(19) United States
(12) Patent Application Publication
(10) Pub. No.: US 2025/0121056 A1
(43) Pub. Date: Apr. 17, 2025

(54) METHOD OF TREATING OR AMELIORATING METABOLIC DISORDERS USING GLP-1 RECEPTOR AGONISTS CONJUGATED TO ANTAGONISTS FOR GASTRIC INHIBITORY PEPTIDE RECEPTOR (GIPR)

(71) Applicant: AMGEN INC., Thousand Oaks, CA (US)

(72) Inventors: Yuan CHENG, Newbury Park, CA (US); Chawita NETIROJJANAKUL, Longmont, CO (US); Jerry Ryan HOLDER, Simi Valley, CA (US); Bin WU, Thousand Oaks, CA (US); James R. FALSEY, Moorpark, CA (US); Bradley J. HERBERICH, Newbury Park, CA (US); Kelvin SHAM, Thousand Oaks, CA (US); Leslie P. MIRANDA, Thousand Oaks, CA (US); Shu-Chen LU, Thousand Oaks, CA (US); Murielle M. VENIANT-ELLISON, Thousand Oaks, CA (US); Shanaka STANISLAUS, Thousand Oaks, CA (US); Junming YIE, Warren, NJ (US); Jing XU, Waltham, MA (US)

(73) Assignee: AMGEN INC., Thousand Oaks, CA (US)

(21) Appl. No.: 18/982,197

(22) Filed: Dec. 16, 2024

Related U.S. Application Data
(63) Continuation of application No. 17/151,045, filed on Jan. 15, 2021, now Pat. No. 12,214,051.
Application No. 17/151,045 is a division of application No. 15/872,841, filed on Jan. 16, 2018, now Pat. No. 10,905,772.
(60) Provisional application No. 62/447,332, filed on Jan. 17, 2017.

(51) Int. Cl. A61K 39/395; A61K 47/68; A61P 3/10; C07K 16/28

(52) U.S. Cl. CPC A61K 39/395; A61K 47/6803; A61K 47/6849; A61P 3/10; C07K 16/28; C07K 16/2869; C07K 2317/77

(57) ABSTRACT

Methods of treating metabolic diseases and disorders using a composition comprising an antigen binding protein specific for the GIPR polypeptide conjugated to a GLP-1 receptor agonist are provided. In various embodiments the metabolic disease or disorder is type 2 diabetes, obesity, dyslipidemia, elevated glucose levels, elevated insulin levels and diabetic nephropathy. In certain embodiments the composition comprises an antibody or functional fragment thereof comprising a cysteine at one or more conjugation site(s) wherein the GLP-1 receptor agonist is conjugated to the antibody or functional fragment thereof through the side-chain of the cysteine residue.

### CROSS REFERENCE TO RELATED APPLICATIONS

[0001] This patent application claims the benefit of U.S. provisional application No. 62/447,332, filed Jan. 17, 2017, which is herein incorporated by reference in its entirety.

### FIELD OF THE INVENTION

[0002] The present disclosure relates to the treatment or amelioration of a metabolic disorder, such as type 2 diabetes, elevated glucose levels, elevated insulin levels, obesity, non-alcoholic fatty liver disease, cardiovascular diseases or diabetic nephropathy, using GLP-1 receptor agonists conjugated to an antigen binding protein specific for the gastric inhibitory peptide receptor (GIPR).

### BACKGROUND OF THE INVENTION

[0003] Glucose-dependent insulinotropic polypeptide (GIP) is a single 42-amino acid peptide secreted from K-cells in the small intestine (duodenum and jejunum). Human GIP is derived from the processing of proGIP, a 153-amino acid precursor that is encoded by a gene localized to chromosome 17q (Inagaki et al., Mol Endocrinol 1989; 3:1014-1021; Fehmann et al. Endocr Rev. 1995; 16:390-410). GIP was formerly called gastric inhibitory polypeptide.

[0004] GIP secretion is induced by food ingestion. GIP has a number of physiological effects in tissues, including promotion of fat storage in adipocytes and promotion of pancreatic islet β-cell function and glucose-dependent insulin secretion. GIP and glucagon like polypeptide-1 (GLP-1) are known insulinotropic factors (“incretins”). Intact GIP is rapidly degraded by DPPIV to an inactive form. The insulinotropic effect of GIP is lost in type 2 diabetic patients while GLP-1's incretin effect remains intact (Nauck et al. J. Clinc. Invest. 1993; 91:301-307).

[0005] The GIP receptor (GIPR) is a member of the secretin-glucagon family of G-protein coupled receptors (GPCRs) having an extracellular N-terminus, seven transmembrane domains and an intracellular C-terminus. The N-terminal extracellular domains of this family of receptors are usually glycosylated and form the recognition and binding domain of the receptor. GIPR is highly expressed in a number of tissues, including the pancreas, gut, adipose tissue, heart, pituitary, adrenal cortex, and brain (Usdin et al., Endocrinology. 1993, 133:2861-2870). Human GIPR comprises 466 amino acids and is encoded by a gene located on chro

[0006] mosome 19q13.3 (Gremlich et al., Diabetes. 1995; 44:1202-8; Volz et al., FEBS Lett. 1995, 373:23-29). Studies have suggested that alternative mRNA splicing results in the production of GIP receptor variants of differing lengths in human, rat and mouse.

[0007] GIPR knockout mice (Gipr^{-/-}) are resistant to high fat diet-induced weight gain and have improved insulin sensitivity and lipid profiles. (Yamada et al., Diabetes. 2006, 55:586; Miyawaki et al. Nature Med. 2002, 8:738-742). In addition, a novel small molecule GIPR antagonist SKL-14959 prevents obesity and insulin resistance. (Diabetologia 2008, 51:5373, 44th EASD Annual meeting poster).

[0008] Collectively, these links to obesity and insulin resistance imply GIPR inhibition is a useful approach for therapeutic intervention.

[0009] Glucagon-like peptide-1 is a 31-amino acid peptide derived from the proglucagon gene. It is secreted by intestinal L-cells and released in response to food ingestion to induce insulin secretion from pancreatic β-cells (Diabetes 2004, 53:S3, 205-214). In addition to the incretin effects, GLP-1 also decreases glucagon secretion, delays gastric emptying and reduces caloric intake (Diabetes Care, 2003, 26(10): 2929-2940). GLP-1 exerts its effects by activation of the GLP-1 receptor, which belongs to a class B G-protein-coupled receptor (Endocrinology. 1993, 133(4):1907-10). The function of GLP-1 is limited by rapid degradation by the DPP-IV enzyme, resulting in a half-life of approximately 2 minutes. Recently, long-lasting GLP-1 receptor agonists (GLP-1 RAs) such as exenatide, liraglutide, dulaglutide have been developed and are now being used clinically to improve glycemic control in patients with type 2 diabetes. Furthermore, GLP-1RAs also promote body weight reduction as well as reduction in blood pressure and plasma cholesterol levels in patients (Bioorg. Med. Chem. Lett 2013, 23:4011-4018).

### SUMMARY OF THE INVENTION

[0010] In one aspect, the present disclosure provides a method of treating a subject with a metabolic disorder, the method comprising administering to the subject a therapeutically effective amount of a composition comprising an antigen binding protein that specifically binds to human GIPR, wherein the antigen binding protein is conjugated to a GLP-1 receptor agonist. In one embodiment, the metabolic disorder is a disorder of glucose metabolism. In another embodiment, the glucose metabolism disorder comprises hyperglycemia and administering the antigen binding protein reduces plasma glucose. In another embodiment, the glucose metabolism disorder comprises hyperinsulinemia and administering the antigen binding protein reduces plasma insulin. In another embodiment, the glucose metabolism disorder comprises glucose intolerance and administering the antigen binding protein reduces increases glucose tolerance. In another embodiment, the glucose metabolism disorder comprises insulin resistance and administering the antigen binding protein reduces insulin resistance. In another embodiment, the glucose metabolism disorder comprises diabetes mellitus. In another embodiment, the subject is obese. In another embodiment, administering the composition reduces body weight in an obese subject. In another embodiment, administering the composition reduces body weight gain in an obese subject. In another embodiment, administering the composition reduces fat mass in an obese subject. In another embodiment, the glucose metabolism disorder comprises insulin resistance and administering the composition reduces insulin resistance in an obese subject. In another embodiment, administering the composition reduces liver steatosis in an obese subject having increased liver steatosis. In another embodiment, administering the composition reduces liver fat content in an obese subject having increased liver fat content.

[0011] In one aspect, the composition comprises an antibody or functional fragment thereof that specifically binds to a protein having an amino acid sequence having at least 90% amino acid sequence identity to an amino acid sequence of a human GIPR, wherein the antibody or functional fragment thereof comprises a cysteine or non-canonical amino acid amino acid substitution at one or more conjugation site(s) selected from the group consisting of D70 of the antibody light chain relative to reference sequence SEQ ID NO: 455; E276 of the antibody heavy chain relative to reference sequence SEQ ID NO: 612, and T363 of the antibody heavy chain relative to reference sequence SEQ ID NO: 612; and a GLP-1 receptor agonist, wherein the GLP-1 receptor agonist is conjugated to the antibody or functional fragment thereof through the side-chain of the cysteine residue or non-canonical amino acid residue substituted at the one or more conjugation site(s).

[0012] In one embodiment, the human GIPR has a sequence comprising a sequence selected from the group consisting of SEQ ID NO: 3141, SEQ ID NO: 3143, and SEQ ID NO: 3145. In one embodiment, the antibody or functional fragment thereof is a monoclonal antibody, a recombinant antibody, a human antibody, a humanized antibody, a chimeric antibody, a multispecific antibody, or an antibody fragment thereof. In one embodiment, the antibody fragment is a Fab fragment, a Fab′ fragment, or a F(ab′)2 fragment. In one embodiment, the antibody or functional fragment thereof is of the IgG1-, IgG2-IgG3- or IgG4-type. In one embodiment, the antibody or functional fragment thereof inhibits binding of GIP to the extracellular portion of human GIPR.

[0013] In one embodiment, the GLP-1 receptor agonist is GLP-1(7-37) or a GLP-1(7-37) analog. In one embodiment, the GLP-1 receptor agonist is selected from the group consisting of exenatide, liraglutide, lixisenatide, albiglutide, dulaglutide, semaglutide, and taspoglutide. In one embodiment, the GLP-1 receptor agonist is selected from the group consisting of GLP-1(7-37) (SEQ ID NO: 3184); GLP-1(7-36)-NH₂ (SEQ ID NO: 3185); liraglutide; albiglutide; taspoglutide; dulaglutide, semaglutide; LY2428757; Exendin-4 (SEQ ID NO: 3163); Exendin-3 (SEQ ID NO: 3164); Leu¹⁴-exendin-4 (SEQ ID NO: 3165); Leu¹⁴,Phe²⁵-exendin-4 (SEQ ID NO: 3166); Leu¹⁴,Ala¹⁹,Phe²⁵-exendin-4 (SEQ ID NO: 3167); exendin-4(1-30) (SEQ ID NO: 3168); Leu¹⁴-exendin-4(1-30) (SEQ ID NO: 3169); Leu¹⁴,Phe²⁵-exendin-4(1-30) (SEQ ID NO: 3170); Leu¹⁴,Ala¹⁹,Phe⁵-exendin-4(1-30) (SEQ ID NO: 3171); exendin-4(1-28) (SEQ ID NO: 3172); Leu¹⁴-exendin-4(1-28) (SEQ ID NO: 3173); Leu¹⁴,Phe²⁵-exendin-4(1-28) (SEQ ID NO: 3174); Leu¹⁴,Ala¹⁹,Phe²⁵-exendin-4 (1-28) (SEQ ID NO: 3175); Leu¹⁴,Lys^{17,20},Ala¹⁹,Glu²¹,Phe²⁵,Gln²⁸-exendin-4 (SEQ ID NO: 3176); Leu¹⁴,Lys^{17,20},Ala¹⁹,Glu²¹,Gln²⁸-exendin-4 (SEQ ID NO: 3177); octylGly¹⁴,Gln²⁸-exendin-4 (SEQ ID NO: 3178); Leu¹⁴,Gln²⁸,octylGly³⁴-exendin-4 (SEQ ID NO: 3179); Phe⁴,Leu¹⁴,Gln²⁸,Lys³³,Glu³⁴, Ile^{35,36},Ser³⁷-exendin-4(1-37) (SEQ ID NO: 3180); Phe⁴,Leu¹⁴,Lys^{17,20},Ala¹⁹,Glu²¹,Gln²⁸-exendin-4 (SEQ ID NO: 3181); Val¹¹,Ile¹³,Leu¹⁴,Ala¹⁶,Lys²¹,Phe²⁵-exendin-4 (SEQ ID NO: 3182); exendin-4-Lys⁴⁰ (SEQ ID NO: 3183); GLP-1(7-37) (SEQ ID NO: 3184); GLP-1(7-36)-NH₂ (SEQ ID NO: 3185); Alb^{8,35}Arg^{26,34},Phe³¹-GLP-1(7-36)) (SEQ ID NO: 3186); HXaasEGTFTSDVSSYLEXaa₂₂Xaa₂₃AAKEFIXaa₂₃WLXaa₃₃Xaa₃₄G XaaW₆Xaa₃₇; wherein Xaa₈ is A, V, or G; Xaa₂₂ is G, K, or E; Xaa₂₃ is Q or K; Xaa₃₀ is A or E; Xaa₃₃ is V or K; Xaa₃₄ is K, N, or R; Xaa₃₆ is R or G; and Xaa₃₇ is G, H, P, or absent (SEQ ID NO: 3187); Arg³⁴-GLP-1(7-37) (SEQ ID NO: 3188); Glu³⁰-GLP-1(7-37) (SEQ ID NO: 3189); Lys²²-GLP-1(7-37) (SEQ ID NO: 3190); Gly^{8,36},Glu²²-GLP-1(7-37) (SEQ ID NO: 3191); Val⁸,Glu²²,Gly³⁶-GLP-1(7-37) (SEQ ID NO: 3192); Gly^{8,36},Glu²²,Lys³³Asn³⁴-GLP-1(7-37) (SEQ ID NO: 3193); Val⁸,Glu²²,Lys³³,Asn³⁴,Gly³⁶-GLP-1(7-37) (SEQ ID NO: 3194); Gly^{8,36},Glu²²,Pro³⁷-GLP-1(7-37) (SEQ ID NO: 3195); Val⁸,Glu²²,Gly³⁶,Pro³⁷-GLP-1(7-37) (SEQ ID NO: 3196); Gly^{8,36},Glu²²,Lys³³, Asn³⁴,Pro³⁷-GLP-1(7-37) (SEQ ID NO: 3197); Va⁸,Glu²²,Lys³³,Asn³⁴,Gly³⁶,Pro³⁷-GLP-1(7-37) (SEQ ID NO: 3198); Gly^{8,36},Glu²²-GLP-1(7-36) (SEQ ID NO: 3199); Val⁸,Glu²²,Gly³⁶-GLP-1(7-36) (SEQ ID NO: 3200); Val⁸,Glu²²,Asn³⁴,Gly³⁶-GLP-1(7-36) (SEQ ID NO: 3201); Gly^{8,36},Glu²²,Asn³⁴-GLP-(7-36) (SEQ ID NO: 3202); GLP-1 analog (SEQ ID NO: 3206); GLP-1 analog (SEQ ID NO: 3207); [N^{e}-(17-carboxybeptadecanoic acid)Lys²⁰]exendin-4-NH₂ (SEQ ID NO: 3208); [N^{e}-(17-carboxyhepta-decanoyl)Lys³²]exendin-4-NH₂ (SEQ ID NO: 3209); [desamino-His¹,N^{e}-(17-carboxyheptadecanoyl)Lys²⁰]exendin-4-NH₂ (SEQ ID NO: 3210); [Arg^{12,27},NLe¹⁴,N^{c}-(17-carboxy-heptadecanoyl)Lys²⁰]exendin-4-NH₂ (SEQ ID NO: 3211); [N^{e}-(19-carboxy-nonadecanoylamino)Lys²⁰]-exendin-4-NH₂ (SEQ ID NO: 3212); [N^{e}-(15-carboxypentadecanoylamino)Lys²⁰]-exendin-4-NH₂ (SEQ ID NO: 3213); [N^{e}-(13-carboxytridecanoylamino)Lys²⁰]exendin-4-NH₂ (SEQ ID NO: 3214); [N^{e}-(11-carboxy-undecanoyl-amino)Lys²⁰]exendin-4-NH₂ (SEQ ID NO: 3215); exendin-4-Lys⁴⁰(e-MPA)-NH₂ (SEQ ID NO: 3216); exendin-4-Lys⁴⁰(e-AEEA-AEEA-MPA)-NH₂ (SEQ ID NO: 3217); exendin-4-Lys⁴⁰(e-AEEA-MPA)-NH₂ (SEQ ID NO: 3218); exendin-4-Lys⁴⁰(e-MPA)-albumin (SEQ ID NO: 3219); exendin-4-Lys⁴⁰(e-AEEA-AEEA-MPA)-albumin (SEQ ID NO: 3220); exendin-4-Lys⁴⁰(e-AEEA-MPA)-albumin (SEQ ID NO: 3221); desamino-His⁷,Arg²⁶,Lys(N^{ε}-(γ-Glu(N-α-hexadecanoyl)))-GLP-1(7-37) (core peptide disclosed as SEQ ID NO: 3222) (SEQ ID NO: 3222); desamino-His⁷,Arg²⁶,Lys³⁴(N^{ε}-octanoyl)-GLP-1(7-37) (SEQ ID NO: 3223); Arg^{26,34},Lys³⁸(N^{ε}-(ω-carboxypentadecanoyl))-GLP-1(7-38) (SEQ ID NO: 3224); Arg^{26,34},Lys³⁸(N^{ε}-(γ-Glu(N-α-hexadecanoyl)))-GLP-1(7-36) (core peptide disclosed as SEQ ID NO: 3225) (SEQ ID NO: 3225); [Aib⁸;Lys³⁷]GLP-1 (7-37) (SEQ ID NO: 3226); [Aib⁸, Lys²⁶]GLP-1_(7-37) (SEQ ID NO: 3227); [Aib^{8,22};Lys³⁶]GLP-1(7-36)-Amide (SEQ ID NO: 3228); [Aib^{8,22};BLeu³²;Lys³⁶]GLP-1(7-36)-Amide (SEQ ID NO: 3229); [Aib^{8,22};Lys³⁷]GLP-1(7-37)-Amide (SEQ ID NO: 3230); [Aib^{8,22};BLeu³²;Lys³⁷]GLP-1(7-37)-Amide (SEQ ID NO: 3231); [Aib^{8,22};aMeLeu³²;Lys³⁷]GLP-1(7-37)-Amide (SEQ ID NO: 3232); [Aib^{8,22};AMEF¹²;Lys³⁷]GLP-1(7-37)-Amide (SEQ ID NO: 3233); [Aib^{8,22};BLue¹⁶;Lys³⁷]GLP-1(7-37)-Amide (SEQ ID NO: 3234); [Aib^{8,22};Gly³⁶;Lys³⁷]GLP-1(7-37)-Amide (SEQ ID NO: 3235); [Aib^{8,22};Lys^{33,37};Asn³⁴;Gly³⁶]GLP-1(7-37)-Amide (SEQ ID NO: 3236); [Aib^{8,22};Lys³³;Asn³⁴;Gly³⁶;Aeea³⁷]GLP-(7-37)-Aeea-Lys-Amide (SEQ ID NO: 3237); [Aib^{8,22};Gly³⁶]GLP-1(7-37) (SEQ ID NO: 3238); cyclo[E²³-K²⁷][Aib⁸;Gly³⁶]GLP-1(7-37) (SEQ ID NO: 3239); cyclo[E²²?-K²⁶][Aib⁸;Gly³⁶;Lys³⁷]GLP-1(7-37)-Amide (SEQ ID NO: 3240); [Aib^{8,22}]-GLP-1(7-22)-Ex4(17-39) (SEQ ID NO: 3241); [Gly^{8,36}Glu²²]GLP-1(7-37) (SEQ ID NO: 3242); [Aib⁸;Glu²²;Gly³⁶]GLP-1(7-37)-Amide (SEQ ID NO: 3243); [Aib⁸;Tyr¹⁶;Glu²²;Gly³⁶]GLP-1_(7-37) (SEQ ID NO: 3244); [Aib⁸;Lys^{18,33};Glu^{22,23,30};Val²⁵;Arg²⁶;Leu²⁷;Asn³⁴;Gly³⁶]GLP-1(7-37) (SEQ ID NO: 3245); [Aib⁸;Lys^{18,33};Glu^{22,23,30};Leu²⁷;Asn³⁴;Gly³⁶]GLP-1(7-37) (SEQ ID NO: 3246); [Aib⁸;Lys¹⁸;Glu^{22,23,30};Leu²⁷;Gly³⁶]GLP-1(7-37) (SEQ ID NO: 3247); [Aib^{8,22};Ile⁹;Gly³⁶]GLP-1 (7-36) (SEQ ID NO: 3248); and [Aib^{8,22};Glu¹⁵;Gly³⁶]GLP-36) (SEQ ID NO: 3249).

[0014] In one embodiment, the GLP-1(7-37) or GLP-1(7-37) analog is conjugated to the antibody or fragment thereof at a residue that corresponds to K26, K36, K37, K39 or a C-terminal amine group of said analog.

[0015] In one embodiment, the GLP-1 receptor agonist if conjugated to the antibody or fragment thereof via a peptide linker comprising a sequence selected from the group consisting of (Gly₃Ser)₂, (Gly₄Ser)₂, (Gly₃Ser)₃, (Gly₄Ser)₃, (Gly₃Ser)₄, (Gly₄Ser)₄, (Gly₃Ser)₅, (Gly₄Ser)₅, (Gly₃Ser)₆, and (Gly₄Ser)₆.

### BRIEF DESCRIPTION OF THE DRAWINGS

[0016] FIG. 1. Reaction scheme for the generation of anti-GIPR/GLP-1 peptide conjugate

[0017] FIGS. 2A-2T. GLP-1 receptor agonist activity in CHOK1-GLP-1R H20 recombinant cells and GIPR antagonist activity in 293 HEK-GIPR #10 recombinant cells

[0018] FIGS. 3A-3C. GLP-1 agonist activity of 2G10 conjugate is more potent in cells expressing both GLP-1R and GIPR (CHOK1 hGLP-1R/hGIPR M1) compared to cells only expressing GLP-1R (CHOK1 hGLP-1R H20)

[0019] FIGS. 4A-4R. In vivo activity-glucose and body weight effects in db/db mice

[0020] FIGS. 5A-5D. GLP-1 receptor agonist and GIPR Antagonist In vivo Activity of 5G12 and 2G10 Chemical Conjugates in C57B16 mice (glucose tolerance test)

[0021] FIGS. 6A-6B. GLP-1 receptor agonist and GIPR Antagonist In vivo Activity of 5G12 and 2G10 Chemical Conjugates in DIO mice (plasma glucose and change in body weight)

[0022] FIG. 7. GLP-1R-GIPR bispecific conjugate 1273 reduces body weight in male spontaneously obese cynomolgus monkeys (% change from baseline)

[0023] FIG. 8. GLP-1R-GIPR bispecific conjugate 1273 reduces total energy intake in male spontaneously obese cynomolgus monkeys (% change from baseline)

[0024] FIG. 9. GLP-1R-GIPR bispecific conjugate 1273 reduces fasting insulin in male spontaneously obese cynomolgus monkeys (% change from baseline)

[0025] FIG. 10. GLP-1R-GIPR bispecific conjugate 1273 reduces fasting triglycerides in male spontaneously obese cynomolgus monkeys (% change from baseline)

[0026] FIG. 11. GLP-1R-GIPR bispecific conjugate 1273 reduces fasting total cholesterol in male spontaneously obese cynomolgus monkeys (% change from baseline)

[0027] FIG. 12. GLP-1R-GIPR bispecific conjugate 1264 reduces body weight in male spontaneously obese cynomolgus monkeys (% change from baseline)

[0028] FIG. 13. GLP-1R-GIPR bispecific conjugate 1264 reduces total energy intake in male spontaneously obese cynomolgus monkeys (% change from baseline)

[0029] FIG. 14. GLP-1R-GIPR bispecific conjugate 1264 reduces fasting insulin in male spontaneously obese cynomolgus monkeys (% change from baseline)

[0030] FIG. 15. GLP-1R-GIPR bispecific conjugate 1264 reduces fasting triglycerides in male spontaneously obese cynomolgus monkeys (% change from baseline)

[0031] FIG. 16. GLP-1R-GIPR bispecific conjugate 1264 reduces fasting total cholesterol in male spontaneously obese cynomolgus monkeys (% change from baseline)

[0032] FIG. 17. GLP-1R-GIPR bispecific conjugates 1248 and 1257 reduce body weight in male spontaneously obese cynomolgus monkeys (% change from baseline)

[0033] FIG. 18. GLP-1R-GIPR bispecific conjugates 1248 and 1257 reduce total energy intake in male spontaneously obese cynomolgus monkeys (% change from baseline)

[0034] FIG. 19. GLP-1R-GIPR bispecific conjugates 1248 and 1257 reduce fasting insulin in male spontaneously obese cynomolgus monkeys (% change from baseline)

[0035] FIG. 20. GLP-1R-GIPR bispecific conjugates 1248 and 1257 reduce fasting triglycerides in male spontaneously obese cynomolgus monkeys (% change from baseline)

[0036] FIG. 21. GLP-1R-GIPR bispecific conjugates 1248 and 1257 reduce fasting cholesterol in male spontaneously obese cynomolgus monkeys (% change from baseline)

[0037] FIGS. 22A-22B. Binding affinity of anti-GIPR/GLP-1R bispecific conjugates

[0038] FIG. 23. Anti-GIPR/GLP-1R bispecific conjugate 1248 promotes strong GLP-1R and GIPR internalization in cells expressing both GLP-1R and GIPR

[0039] FIGS. 24A-24B. Time course and dose response of anti-GIPR/GLP-1R bispecific conjugates in GLP-1R internalization assay

[0040] FIGS. 25A-25D. GLP-1R, GIPR and bispecific conjugate are co-localized upon internalization

[0041] FIGS. 26A-26B. Inhibition of receptor internalization reduces 1248-induced cAMP generation

[0042] FIGS. 27A-27C. Bispecific conjugates show binding to GLP-1R and GIPR in FACS analysis

[0043] FIG. 28. Anti-GIPR/GLP-1R bispecific conjugates stimulate calcium flux

[0044] FIGS. 29A-29B. Anti-GIPR/GLP-1R bispecific conjugate 1248 promotes beta-arrestin recruitments through both GLP-1R and GIPR pathways

[0045] FIG. 30. Anti-GIPR/GLP-1R bispecific conjugate 1248 stimulates insulin secretion in human pancreatic microislets

### DETAILED DESCRIPTION OF THE INVENTION

[0046] The present disclosure provides a method of treating a metabolic disorder, such as a disorder of glucose metabolism (e.g. Type 2 diabetes, elevated glucose levels, elevated insulin levels, dyslipidemia, metabolic syndrome (Syndrome X or insulin resistance syndrome), glucosuria, metabolic acidosis, diabetic neuropathy, diabetic nephropathy, diabetic retinopathy, diabetic cardiomyopathy, Type 1 diabetes, obesity and conditions exacerbated by obesity) by blocking or interfering with the biological activity of GIP. In one embodiment, a therapeutically effective amount of an isolated human GIPR binding protein conjugated to a GLP-1 receptor agonist is administered to a subject in need thereof. Methods of administration and delivery are also provided.

[0047] Recombinant polypeptide and nucleic acid methods used herein, including in the Examples, are generally those set forth in Sambrook et al., Molecular Cloning: A Laboratory Manual (Cold Spring Harbor Laboratory Press, 1989) or Current Protocols in Molecular Biology (Ausubel et al., eds., Green Publishers Inc. and Wiley and Sons 1994), both of which are incorporated herein by reference for any purpose.

[0048] The section headings used herein are for organizational purposes only and are not to be construed as limiting the subject matter described.

[0049] Unless otherwise defined herein, scientific and technical terms used in connection with the present application shall have the meanings that are commonly understood by those of ordinary skill in the art. Further, unless otherwise required by context, singular terms shall include pluralities and plural terms shall include the singular.

[0050] Generally, nomenclatures used in connection with, and techniques of, cell and tissue culture, molecular biology, immunology, microbiology, genetics and protein and nucleic acid chemistry and hybridization described herein are those well known and commonly used in the art. The methods and techniques of the present application are generally performed according to conventional methods well known in the art and as described in various general and more specific references that are cited and discussed throughout the present specification unless otherwise indicated. See, e.g., Sambrook et al., Molecular Cloning: A Laboratory Manual, 3rd ed., Cold Spring Harbor Laboratory Press, Cold Spring Harbor, N.Y. (2001), Ausubel et al., Current Protocols in Molecular Biology, Greene Publishing Associates (1992), and Harlow and Lane Antibodies: A Laboratory Manual Cold Spring Harbor Laboratory Press, Cold Spring Harbor, N.Y. (1990), which are incorporated herein by reference. Enzymatic reactions and purification techniques are performed according to manufacturer's specifications, as commonly accomplished in the art or as described herein. The terminology used in connection with, and the laboratory procedures and techniques of, analytical chemistry, synthetic organic chemistry, and medicinal and pharmaceutical chemistry described herein are those well-known and commonly used in the art. Standard techniques can be used for chemical syntheses, chemical analyses, pharmaceutical preparation, formulation, and delivery, and treatment of patients.

[0051] It should be understood that this invention is not limited to the particular methodology, protocols, and reagents, etc., described herein and as such may vary. The terminology used herein is for the purpose of describing particular embodiments only, and is not intended to limit the scope of the disclosed, which is defined solely by the claims.

[0052] Other than in the operating examples, or where otherwise indicated, all numbers expressing quantities of ingredients or reaction conditions used herein should be understood as modified in all instances by the term “about.” The term “about” when used in connection with percentages may mean ±10%.

[0053] Following convention, as used herein “a” and “an” mean “one or more” unless specifically indicated otherwise.

[0054] As used herein, the terms “amino acid” and “residue” are interchangeable and, when used in the context of a peptide or polypeptide, refer to both naturally occurring and synthetic amino acids, as well as amino acid analogs, amino acid mimetics and non-naturally occurring amino acids that are chemically similar to the naturally occurring amino acids.

[0055] A “naturally occurring amino acid” is an amino acid that is encoded by the genetic code, as well as those amino acids that are encoded by the genetic code that are modified after synthesis, e.g., hydroxyproline, γ-carboxyglutamate, and O-phosphoserine. An amino acid analog is a compound that has the same basic chemical structure as a naturally occurring amino acid, i.e., an a carbon that is bound to a hydrogen, a carboxyl group, an amino group, and an R group, e.g., homoserine, norleucine, methionine sulfoxide, methionine methyl sulfonium. Such analogs can have modified R groups (e.g., norleucine) or modified peptide backbones, but will retain the same basic chemical structure as a naturally occurring amino acid.

[0056] An “amino acid mimetic” is a chemical compound that has a structure that is different from the general chemical structure of an amino acid, but that functions in a manner similar to a naturally occurring amino acid. Examples include a methacryloyl or acryloyl derivative of an amide, β-, γ-, δ-imino acids (such as piperidine-4-carboxylic acid) and the like.

[0057] A “non-naturally occurring amino acid” is a compound that has the same basic chemical structure as a naturally occurring amino acid, but is not incorporated into a growing polypeptide chain by the translation complex. “Non-naturally occurring amino acid” also includes, but is not limited to, amino acids that occur by modification (e.g., posttranslational modifications) of a naturally encoded amino acid (including but not limited to, the 20 common amino acids) but are not themselves naturally incorporated into a growing polypeptide chain by the translation complex. A non-limiting lists of examples of non-naturally occurring amino acids that can be inserted into a polypeptide sequence or substituted for a wild-type residue in polypeptide sequence include n-amino acids, homoamino acids, cyclic amino acids and amino acids with derivatized side chains. Examples include (in the L-form or D-form; abbreviated as in parentheses): citrulline (Cit), homocitrulline (hCit), Nα-methylcitrulline (NMeCit), Nα-methylhomocitrulline (Nα-MeHoCit), ornithine (Om), Nα-Methylornithine (Nα-MeOm or NMeOrn), sarcosine (Sar), homolysine (hLys or hK), homoarginine (hArg or hR), homoglutamine (hQ), Nα-methylarginine (NMeR), Nα-methylleucine (Nα-MeL or NMeL), N-methylhomolysine (NMeHoK), Nα-methylglutamine (NMeQ), norleucine (Nle), norvaline (Nva), 1,2,3,4-tetrahydroisoquinoline (Tic), Octahydroindole-2-carboxylic acid (Oic), 3-(1-naphthyl)alanine (1-Nal), 3-(2-naphthyl)alanine (2-Nal), 1,2,3,4-tetrahydroisoquinoline (Tic), 2-indanylglycine (IgI), para-iodophenylalanine (pI-Phe), para-aminophenylalanine (4AmP or 4-Amino-Phe), 4-guanidino phenylalanine (Guf), glycyllysine (abbreviated “K(N^{ε}-glycyl)” or “K(glycyl)” or “K(gly)”), nitrophenylalanine (nitrophe), aminophenylalanine (aminophe or Amino-Phe), benzylphenylalanine (benzylphe), γ-carboxyglutamic acid (γ-carboxyglu), hydroxyproline (hydroxypro), p-carboxyl-phenylalanine (Cpa), α-aminoadipic acid (Aad), Nα-methyl valine (NMeVal), N-α-methyl leucine (NMeLeu), Nα-methylnorleucine (NMeNle), cyclopentylglycine (Cpg), cyclohexylglycine (Chg), acetylarginine (acetylarg), α, β-diaminopropionoic acid (Dpr), α, γ-diaminobutyric acid (Dab), diaminopropionic acid (Dap), cyclohexylalanine (Cha), 4-methyl-phenylalanine (MePhe), β, β-diphenyl-alanine (BiPhA), aminobutyric acid (Abu), 4-phenyl-phenylalanine (or biphenylalanine; 4Bip), α-amino-isobutyric acid (Aib), beta-alanine, beta-aminopropionic acid, piperidinic acid, aminocaprioic acid, aminoheptanoic acid, aminopimelic acid, desmosine, diaminopimelic acid, N-ethylglycine, N-ethylaspargine, hydroxylysine, allo-hydroxylysine, isodesmosine, allo-isoleucine, N-methylglycine, N-methylisoleucine, N-methylvaline, 4-hydroxyproline (Hyp), γ-carboxyglutamate, ε-N,N,N-trimethyllysine, ε-N-acetyllysine, O-phosphoserine, N-acetylserine, N-formylmethionine, 3-methylhistidine, 5-hydroxylysine, ω-methylarginine, 4-Amino-O-Phthalic Acid (4APA), and other similar amino acids, and derivatized forms of any of those specifically listed.

[0058] The term “isolated nucleic acid molecule” refers to a single or double-stranded polymer of deoxyribonucleotide or ribonucleotide bases read from the 5′ to the 3′ end (e.g., a GIPR nucleic acid sequence provided herein), or an analog thereof, that has been separated from at least about 50 percent of polypeptides, peptides, lipids, carbohydrates, polynucleotides or other materials with which the nucleic acid is naturally found when total nucleic acid is isolated from the source cells. Preferably, an isolated nucleic acid molecule is substantially free from any other contaminating nucleic acid molecules or other molecules that are found in the natural environment of the nucleic acid that would interfere with its use in polypeptide production or its therapeutic, diagnostic, prophylactic or research use.

[0059] The term “isolated polypeptide” refers to a polypeptide (e.g., a GIPR polypeptide sequence provided herein or an antigen binding protein of the present invention) that has been separated from at least about 50 percent of polypeptides, peptides, lipids, carbohydrates, polynucleotides, or other materials with which the polypeptide is naturally found when isolated from a source cell. Preferably, the isolated polypeptide is substantially free from any other contaminating polypeptides or other contaminants that are found in its natural environment that would interfere with its therapeutic, diagnostic, prophylactic or research use.

[0060] A composition of the present invention that includes a GLP-1 receptor agonist of the invention covalently linked, attached, or bound, either directly or indirectly through a linker moiety, to another an anti-GIPR antigen binding protein of the invention or is a “conjugate” or “conjugated” molecule, whether conjugated by chemical means (e.g., post-translationally or post-synthetically).

[0061] The term “encoding” refers to a polynucleotide sequence encoding one or more amino acids. The term does not require a start or stop codon.

[0062] The terms “identical” and percent “identity,” in the context of two or more nucleic acids or polypeptide sequences, refer to two or more sequences or subsequences that are the same. “Percent identity” means the percent of identical residues between the amino acids or nucleotides in the compared molecules and is calculated based on the size of the smallest of the molecules being compared. For these calculations, gaps in alignments (if any) can be addressed by a particular mathematical model or computer program (i.e., an “algorithm”). Methods that can be used to calculate the identity of the aligned nucleic acids or polypeptides include those described in Computational Molecular Biology, (Lesk, A. M., ed.), (1988) New York: Oxford University Press; Biocomputing Informatics and Genome Projects, (Smith, D. W., ed.), 1993, New York: Academic Press; Computer Analysis of Sequence Data, Part I, (Griffin, A. M., and Griffin, H. G., eds.), 1994, New Jersey: Humana Press; von Heinje, G., (1987) Sequence Analysis in Molecular Biology, New York: Academic Press; Sequence Analysis Primer, (Gribskov, M. and Devereux, J., eds.), 1991, New York: M. Stockton Press; and Carillo et al., (1988) SIAM J. Applied Math. 48:1073.

[0063] In calculating percent identity, the sequences being compared are aligned in a way that gives the largest match between the sequences. The computer program used to determine percent identity is the GCG program package, which includes GAP (Devereux et al., (1984) Nucl. Acid Res. 12:387; Genetics Computer Group, University of Wisconsin, Madison, WI). The computer algorithm GAP is used to align the two polypeptides or polynucleotides for which the percent sequence identity is to be determined. The sequences are aligned for optimal matching of their respective amino acid or nucleotide (the “matched span”, as determined by the algorithm). A gap opening penalty (which is calculated as 3× the average diagonal, wherein the “average diagonal” is the average of the diagonal of the comparison matrix being used; the “diagonal” is the score or number assigned to each perfect amino acid match by the particular comparison matrix) and a gap extension penalty (which is usually 1/10 times the gap opening penalty), as well as a comparison matrix such as PAM 250 or BLOSUM 62 are used in conjunction with the algorithm. In certain embodiments, a standard comparison matrix (see, Dayhoff et al., (1978) Atlas of Protein Sequence and Structure 5:345-352 for the PAM 250 comparison matrix; Henikoff et al., (1992) Proc. Natl. Acad. Sci. U.S.A. 89:10915-10919 for the BLOSUM 62 comparison matrix) is also used by the algorithm.

[0064] Recommended parameters for determining percent identity for polypeptides or nucleotide sequences using the GAP program are the following:
[0065] Algorithm: Needleman et al., 1970, J. Mol. Biol. 48:443-453;
[0066] Comparison matrix: BLOSUM 62 from Henikoff et al., 1992, supra;
[0067] Gap Penalty: 12 (but with no penalty for end gaps)
[0068] Gap Length Penalty: 4
[0069] Threshold of Similarity: 0

[0070] Certain alignment schemes for aligning two amino acid sequences can result in matching of only a short region of the two sequences, and this small aligned region can have very high sequence identity even though there is no significant relationship between the two full-length sequences. Accordingly, the selected alignment method (e.g., the GAP program) can be adjusted if so desired to result in an alignment that spans at least 50 contiguous amino acids of the target polypeptide.

[0071] The terms “GIPR polypeptide” and “GIPR protein” are used interchangeably and mean a naturally-occurring wild-type polypeptide expressed in a mammal, such as a human or a mouse, and includes naturally occurring alleles (e.g., naturally occurring allelic forms of human GIPR protein). For purposes of this disclosure, the term “GIPR polypeptide” can be used interchangeably to refer to any full-length GIPR polypeptide, e.g., SEQ ID NO: 3141, which consists of 466 amino acid residues and which is encoded by the nucleotide sequence SEQ ID NO: 3142, or SEQ ID NO: 3143, which consists of 430 amino acid residues and which is encoded by the nucleic acid sequence SEQ ID NO: 3144, or SEQ ID NO: 3145, which consists of 493 amino acid resides and which is encoded by the nucleic acid sequence of SEQ ID NO: 3146, or SEQ ID NO. 3147, which consists of 460 amino acids residues and which is encoded by the nucleic acid sequence of SEQ ID NO: 3148, or SEQ ID NO. 3149, which consists of 230 amino acids residues and which is encoded by the nucleic acid sequence of SEQ ID NO: 3150.

[0072] The term “GIPR polypeptide” also encompasses a GIPR polypeptide in which a naturally occurring GIPR polypeptide sequence (e.g., SEQ ID NOs: 3141, 3143 or 3145) has been modified. Such modifications include, but are not limited to, one or more amino acid substitutions, including substitutions with non-naturally occurring amino acids non-naturally-occurring amino acid analogs and amino acid mimetics.

[0073] In various embodiments, a GIPR polypeptide comprises an amino acid sequence that is at least about 90 percent identical to a naturally-occurring GIPR polypeptide (e.g., SEQ ID NOs: 3141, 3143 or 3145). In other embodiments, a GIPR polypeptide comprises an amino acid sequence that is at least about 95, 96, 97, 98, or 99 percent identical to a naturally-occurring GIPR polypeptide amino acid sequence (e.g., SEQ ID NOs: 3141, 3143 or 3145). Such GIPR polypeptides preferably, but need not, possess at least one activity of a wild-type GIPR polypeptide, such as the ability to bind GIP. The present invention also encompasses nucleic acid molecules encoding such GIPR polypeptide sequences.

[0074] The terms “GIPR activity assay” (also referred to as a “GIPR functional assay”) means an assay that can be used to measure GIP or a GIP binding protein activity in a cellular setting. In one embodiment, the “activity” (or “functional”) assay” can be a cAMP assay in GIPR expressing cells, in which GIP can induce cAMP signal, and the activity of a GIP/GIPR binding protein could be measured in the presence/absence of GIP ligand, in which IC50/EC50 and degree of inhibition/activation can be obtained (Biochemical and Biophysical Research Communications (2002) 290:1420-1426). In another embodiment, the “activity” (or “functional”) assay can be an insulin secretion assay in pancreatic beta cells, in which GIP can induce glucose-dependent insulin secretion, and the activity of a GIP/GIPR binding protein could be measured in the presence/absence of GIP ligand, in which IC50/EC50 and degree of inhibition/activation can be obtained (Biochemical and Biophysical Research Communications (2002) 290:1420-1426).

[0075] The term “GIPR binding assay” means an assay that can be used to measure binding of GIP to GIPR. In one embodiment, “GIPR binding assay” can be an assay using FMAT or FACS that measures fluorescence-labeled GIP binding to GIPR expression cells, and GIP/GIPR binding protein's activity can be measured for displacing fluorescence-labeled GIP binding to GIPR expression cells. In another embodiment, “GIPR binding assay” can be an assay that measures radioactive-labeled GIP binding to GIPR expression cells, and GIP/GIPR binding protein's activity can be measured for displacing radioactive labeled GIP binding to GIPR expression cells (Biochimica et Biophysica Acta (2001) 1547:143-155).

[0076] The terms “GIP”, “Gastric inhibitory polypeptide”, “glucose-dependent insulinotropic peptide” and “GIP ligand” are used interchangeably and mean a naturally-occurring wild-type polypeptide expressed in a mammal, such as a human or a mouse, and includes naturally occurring alleles (e.g., naturally occurring allelic forms of human GIP protein). For purposes of this disclosure, the term “GIP” can be used interchangeably to refer to any mature GIP polypeptide.

[0077] The 42 amino acid sequence of mature human GIP is:

(SEQ ID NO: 3151)
YAEGTFISDY SIAMDKIHQQ DFVNWLLAQK GKKNDWKHNI TQ

[0078] and is encoded by the DNA sequence:

(SEQ ID NO: 3152)
tatgcggaag gcacctttat tagcgattat agcattgcga
tggataaaat tcatcagcag gattttgtga actggctgct
ggcgcagaaa ggcaaaaaaa acgattggaa acataacatt
acccag.

[0079] The 42 amino acid sequence of mature murine GIP is:

(SEQ ID NO: 3153)
YAEGTFISDY SIAMDKIRQQ DFVNWLLAQR GKKSDWKHNI TQ

[0080] and is encoded by the DNA sequence:

(SEQ ID NO: 3154)
tatgcggaag gcacctttat tagcgattat agcattgcga
tggataaaat tcgccagcag gattttgtga actggctgct
ggcgcagcgc ggcaaaaaaa gcgattggaa acataacatt
acccag.

[0081] The 42 amino acid sequence of mature rat GIP is:

(SEQ ID NO: 3155)
YAEGTFISDY SIAMDKIRQQ DFVNWLLAQK GKKNDWKHNL TQ

[0082] and is encoded by the DNA sequence:

(SEQ ID NO: 3156)
tatgcggaag gcacctttat tagcgattat agcattgcga
tggataaaat tcgccagcag gattttgtga actggctgctg
gcgcagaaag gcaaaaaaaa cgattggaaa cataacctga
cccag.

[0083] A “GIPR antagonist” refers to compounds that reduce or inhibit GIP activation of GIPR. Such antagonists include chemically synthesized small molecules and antigen binding proteins.

[0084] An “antigen binding protein” as used herein means any protein that specifically binds a specified target antigen, such as a GIPR polypeptide (e.g., a human GIPR polypeptide such as provided in SEQ ID NOs: 3141, 3143 or 3145). The term encompasses intact antibodies that comprise at least two full-length heavy chains and two full-length light chains, as well as derivatives, variants, fragments, and mutations thereof. Examples of antibody fragments include Fab, Fab′, F(ab′)₂, and Fv fragments. An antigen binding protein also includes domain antibodies such as nanobodies and scFvs as described further below.

[0085] In general, a GIPR antigen binding protein is said to “specifically bind” its target antigen GIPR when the antigen binding protein exhibits essentially background binding to non-GIPR molecules. An antigen binding protein that specifically binds GIPR may, however, cross-react with GIPR polypeptides from different species. Typically, a GIPR antigen binding protein specifically binds human GIPR when the dissociation constant (KD) is ≤10⁻⁷ M as measured via a surface plasma resonance technique (e.g., BIACore, GE-Healthcare Uppsala, Sweden) or Kinetic Exclusion Assay (KinExA, Sapidyne, Boise, Idaho). A GIPR antigen binding protein specifically binds human GIPR with “high affinity” when the KD is ≤5×10⁻⁹ M, and with “very high affinity” when the KD is ≤5×10⁻¹⁰ M, as measured using methods described.

[0086] “Antigen binding region” means a protein, or a portion of a protein, that specifically binds a specified antigen. For example, that portion of an antigen binding protein that contains the amino acid residues that interact with an antigen and confer on the antigen binding protein its specificity and affinity for the antigen is referred to as “antigen binding region.” An antigen binding region typically includes one or more “complementary binding regions” (“CDRs”) of an immunoglobulin, single-chain immunoglobulin, or camelid antibody. Certain antigen binding regions also include one or more “framework” regions. A “CDR” is an amino acid sequence that contributes to antigen binding specificity and affinity. “Framework” regions can aid in maintaining the proper conformation of the CDRs to promote binding between the antigen binding region and an antigen.

[0087] A “recombinant protein”, including a recombinant GIPR antigen binding protein, is a protein made using recombinant techniques, i.e., through the expression of a recombinant nucleic acid as described herein. Methods and techniques for the production of recombinant proteins are well known in the art.

[0088] The term “antibody” refers to an intact immunoglobulin of any isotype, or a fragment thereof that can compete with the intact antibody for specific binding to the target antigen, and includes, for instance, chimeric, humanized, fully human, and bispecific antibodies. An “antibody” as such is a species of an antigen binding protein. An intact antibody generally will comprise at least two full-length heavy chains and two full-length light chains. Antibodies may be derived solely from a single source, or may be “chimeric,” that is, different portions of the antibody may be derived from two different antibodies as described further below. The antigen binding proteins, antibodies, or binding fragments may be produced in hybridomas, by recombinant DNA techniques, or by enzymatic or chemical cleavage of intact antibodies.

[0089] The term “light chain” as used with respect to an antibody or fragments thereof includes a full-length light chain and fragments thereof having sufficient variable region sequence to confer binding specificity. A full-length light chain includes a variable region domain, VL, and a constant region domain, CL. The variable region domain of the light chain is at the amino-terminus of the polypeptide. Light chains include kappa chains and lambda chains.

[0090] The term “heavy chain” as used with respect to an antibody or fragment thereof includes a full-length heavy chain and fragments thereof having sufficient variable region sequence to confer binding specificity. A full-length heavy chain includes a variable region domain, VH, and three constant region domains, CH1, CH2, and CH3. The VH domain is at the amino-terminus of the polypeptide, and the CH domains are at the carboxyl-terminus, with the CH3 being closest to the carboxy-terminus of the polypeptide. Heavy chains may be of any isotype, including IgG (including IgG1, IgG2, IgG3 and IgG4 subtypes), IgA (including IgA1 and IgA2 subtypes), IgM and IgE.

[0091] The term “immunologically functional fragment” (or simply “fragment”) of an antibody or immunoglobulin chain (heavy or light chain), as used herein, is an antigen binding protein comprising a portion (regardless of how that portion is obtained or synthesized) of an antibody that lacks at least some of the amino acids present in a full-length chain but which is capable of specifically binding to an antigen. Such fragments are biologically active in that they bind specifically to the target antigen and can compete with other antigen binding proteins, including intact antibodies, for specific binding to a given epitope.

[0092] These biologically active fragments may be produced by recombinant DNA techniques, or may be produced by enzymatic or chemical cleavage of antigen binding proteins, including intact antibodies. Immunologically functional immunoglobulin fragments include, but are not limited to, Fab, Fab′, and F(ab′)₂ fragments.

[0093] In another embodiment, Fvs, domain antibodies and scFvs, and may be derived from an antibody of the present invention.

[0094] It is contemplated further that a functional portion of the antigen binding proteins disclosed herein, for example, one or more CDRs, could be covalently bound to a second protein or to a small molecule to create a therapeutic agent directed to a particular target in the body, possessing bifunctional therapeutic properties, or having a prolonged serum half-life.

[0095] A “Fab fragment” is comprised of one light chain and the CH1 and variable regions of one heavy chain. The heavy chain of a Fab molecule cannot form a disulfide bond with another heavy chain molecule.

[0096] An “Fc” region contains two heavy chain fragments comprising the CH2 and CH3 domains of an antibody. The two heavy chain fragments are held together by two or more disulfide bonds and by hydrophobic interactions of the CH3 domains.

[0097] An “Fab′ fragment” contains one light chain and a portion of one heavy chain that contains the VH domain and the CH1 domain and also the region between the CH1 and CH2 domains, such that an interchain disulfide bond can be formed between the two heavy chains of two Fab′ fragments to form an F(ab′)₂ molecule.

[0098] An “F(ab′)₂ fragment” contains two light chains and two heavy chains containing a portion of the constant region between the CH1 and CH2 domains, such that an interchain disulfide bond is formed between the two heavy chains. A F(ab′)₂ fragment thus is composed of two Fab′ fragments that are held together by a disulfide bond between the two heavy chains.

[0099] The “Fv region” comprises the variable regions from both the heavy and light chains, but lacks the constant regions.

[0100] “Single chain antibodies” or “scFvs” are Fv molecules in which the heavy and light chain variable regions have been connected by a flexible linker to form a single polypeptide chain, which forms an antigen-binding region. scFvs are discussed in detail in International Patent Application Publication No. WO 88/01649 and U.S. Pat. Nos. 4,946,778 and 5,260,203, the disclosures of which are incorporated by reference.

[0101] A “domain antibody” or “single chain immunoglobulin” is an immunologically functional immunoglobulin fragment containing only the variable region of a heavy chain or the variable region of a light chain. Examples of domain antibodies include Nanobodies®. In some instances, two or more VH regions are covalently joined with a peptide linker to create a bivalent domain antibody. The two VH regions of a bivalent domain antibody may target the same or different antigens.

[0102] A “bivalent antigen binding protein” or “bivalent antibody” comprises two antigen binding regions. In some instances, the two binding regions have the same antigen specificities. Bivalent antigen binding proteins and bivalent antibodies may be bispecific, see, infra.

[0103] A multispecific antigen binding protein” or “multispecific antibody” is one that targets more than one antigen or epitope.

[0104] A “bispecific,” “dual-specific” or “bifunctional” antigen binding protein or antibody is a hybrid antigen binding protein or antibody, respectively, having two different antigen binding sites. Bispecific antigen binding proteins and antibodies are a species of multispecific antigen binding protein or multispecific antibody and may be produced by a variety of methods including, but not limited to, fusion of hybridomas or linking of Fab′ fragments. See, e.g., Songsivilai and Lachmann, 1990, Clin. Exp. Immunol. 79:315-321; Kostelny et al., 1992, J. Immunol. 148:1547-1553. The two binding sites of a bispecific antigen binding protein or antibody will bind to two different epitopes, which may reside on the same or different protein targets.

[0105] The term “compete” when used in the context of antigen binding proteins (e.g., antibodies) means competition between antigen binding proteins is determined by an assay in which the antigen binding protein (e.g., antibody or immunologically functional fragment thereof) under test prevents or inhibits specific binding of a reference antigen binding protein to a common antigen (e.g., GIPR or a fragment thereof). Numerous types of competitive binding assays can be used, for example: solid phase direct or indirect radioimmunoassay (RIA), solid phase direct or indirect enzyme immunoassay (EIA), sandwich competition assay (see, e.g., Stahli et al., 1983, Methods in Enzymology 9:242-253); solid phase direct biotin-avidin EIA (see, e.g., Kirkland et al., 1986, J. Immunol. 137:3614-3619) solid phase direct labeled assay, solid phase direct labeled sandwich assay (see, e.g., Harlow and Lane, 1988, Antibodies, A Laboratory Manual, Cold Spring Harbor Press); solid phase direct label RIA using 1-125 label (see, e.g., Morel et al., 1988, Molec. Immunol. 25:7-15); solid phase direct biotin-avidin EIA (see, e.g., Cheung, et al., 1990, Virology 176:546-552); and direct labeled RIA (Moldenhauer et al., 1990, Scand. J. Immunol. 32:77-82). Typically, such an assay involves the use of purified antigen bound to a solid surface or cells bearing either of these, an unlabelled test antigen binding protein and a labeled reference antigen binding protein. Competitive inhibition is measured by determining the amount of label bound to the solid surface or cells in the presence of the test antigen binding protein. Usually the test antigen binding protein is present in excess. Additional details regarding methods for determining competitive binding are provided in the examples herein. Usually, when a competing antigen binding protein is present in excess, it will inhibit specific binding of a reference antigen binding protein to a common antigen by at least 40%, 45%, 50%, 55%, 60%, 65%, 70% or 75%. In some instances, binding is inhibited by at least 80%, 85%, 90%, 95%, or 97% or more.

[0106] The term “antigen” refers to a molecule or a portion of a molecule capable of being bound by a selective binding agent, such as an antigen binding protein (including, e.g., an antibody), and additionally capable of being used in an animal to produce antibodies capable of binding to that antigen. An antigen may possess one or more epitopes that are capable of interacting with different antigen binding proteins, e.g., antibodies.

[0107] The term “epitope” is the portion of a molecule that is bound by an antigen binding protein (for example, an antibody). The term includes any determinant capable of specifically binding to an antigen binding protein, such as an antibody. An epitope can be contiguous or non-contiguous (discontinuous) (e.g., in a polypeptide, amino acid residues that are not contiguous to one another in the polypeptide sequence but that within in context of the molecule are bound by the antigen binding protein). A conformational epitope is an epitope that exists within the conformation of an active protein but is not present in a denatured protein. In certain embodiments, epitopes may be mimetic in that they comprise a three dimensional structure that is similar to an epitope used to generate the antigen binding protein, yet comprise none or only some of the amino acid residues found in that epitope used to generate the antigen binding protein. Most often, epitopes reside on proteins, but in some instances may reside on other kinds of molecules, such as nucleic acids. Epitope determinants may include chemically active surface groupings of molecules such as amino acids, sugar side chains, phosphoryl or sulfonyl groups, and may have specific three dimensional structural characteristics, and/or specific charge characteristics. Generally, antigen binding proteins specific for a particular target antigen will preferentially recognize an epitope on the target antigen in a complex mixture of proteins and/or macromolecules.

[0108] As used herein, “substantially pure” means that the described species of molecule is the predominant species present, that is, on a molar basis it is more abundant than any other individual species in the same mixture. In certain embodiments, a substantially pure molecule is a composition wherein the object species comprises at least 50% (on a molar basis) of all macromolecular species present. In other embodiments, a substantially pure composition will comprise at least 80%, 85%, 90%, 95%, 96%, 97%, 98%, or 99% of all macromolecular species present in the composition. In other embodiments, the object species is purified to essential homogeneity wherein contaminating species cannot be detected in the composition by conventional detection methods and thus the composition consists of a single detectable macromolecular species.

[0109] The term “treating” refers to any indicia of success in the treatment or amelioration of an injury, pathology or condition, including any objective or subjective parameter such as abatement; remission; diminishing of symptoms or making the injury, pathology or condition more tolerable to the patient; slowing in the rate of degeneration or decline; making the final point of degeneration less debilitating; improving a patient's physical or mental well-being. The treatment or amelioration of symptoms can be based on objective or subjective parameters; including the results of a physical examination, neuropsychiatric exams, and/or a psychiatric evaluation. For example, certain methods presented herein successfully treat cardiovascular disease such as atherosclerosis by decreasing the incidence of cardiovascular disease, causing remission of cardiovascular disease and/or ameliorating a symptom associated with cardiovascular disease.

[0110] An “effective amount” is generally an amount sufficient to reduce the severity and/or frequency of symptoms, eliminate the symptoms and/or underlying cause, prevent the occurrence of symptoms and/or their underlying cause, and/or improve or remediate the damage that results from or is associated with the disease state (e.g., diabetes, obesity, dyslipidemia, elevated glucose levels, elevated insulin levels or diabetic nephropathy. In some embodiments, the effective amount is a therapeutically effective amount or a prophylactically effective amount. A “therapeutically effective amount” is an amount sufficient to remedy a disease state (e.g. atherosclerosis) or symptoms, particularly a state or symptoms associated with the disease state, or otherwise prevent, hinder, retard or reverse the progression of the disease state or any other undesirable symptom associated with the disease in any way whatsoever. A “prophylactically effective amount” is an amount of a pharmaceutical composition that, when administered to a subject, will have the intended prophylactic effect, e.g., preventing or delaying the onset (or reoccurrence) of the disease state, or reducing the likelihood of the onset (or reoccurrence) of the disease state or associated symptoms. The full therapeutic or prophylactic effect does not necessarily occur by administration of one dose, and may occur only after administration of a series of doses. Thus, a therapeutically or prophylactically effective amount may be administered in one or more administrations.

[0111] The terms “therapeutically effective dose” and “therapeutically effective amount,” as used herein, means an amount of a GIPR binding protein that elicits a biological or medicinal response in a tissue system, animal, or human being sought by a researcher, physician, or other clinician, which includes alleviation or amelioration of the symptoms of the disease or disorder being treated, i.e., an amount of a GIPR binding protein that supports an observable level of one or more desired biological or medicinal response, for example lowering blood glucose, insulin, triglyceride, or cholesterol levels; reducing body weight; or improving glucose tolerance, energy expenditure, or insulin sensitivity.

[0112] The term “polynucleotide” or “nucleic acid” includes both single-stranded and double-stranded nucleotide polymers. The nucleotides comprising the polynucleotide can be ribonucleotides or deoxyribonucleotides or a modified form of either type of nucleotide. The modifications include base modifications such as bromouridine and inosine derivatives, ribose modifications such as 2′,3′-dideoxyribose, and internucleotide linkage modifications such as phosphorothioate, phosphorodithioate, phosphoroselenoate, phosphorodiselenoate, phosphoroanilothioate, phoshoraniladate and phosphoroamidate.

[0113] The term “oligonucleotide” means a polynucleotide comprising 200 or fewer nucleotides. In some embodiments, oligonucleotides are 10 to 60 bases in length. In other embodiments, oligonucleotides are 12, 13, 14, 15, 16, 17, 18, 19, or 20 to 40 nucleotides in length. Oligonucleotides may be single stranded or double stranded, e.g., for use in the construction of a mutant gene. Oligonucleotides may be sense or antisense oligonucleotides. An oligonucleotide can include a label, including a radiolabel, a fluorescent label, a hapten or an antigenic label, for detection assays. Oligonucleotides may be used, for example, as PCR primers, cloning primers or hybridization probes.

[0114] An “isolated nucleic acid molecule” means a DNA or RNA of genomic, mRNA, cDNA, or synthetic origin or some combination thereof which is not associated with all or a portion of a polynucleotide in which the isolated polynucleotide is found in nature, or is linked to a polynucleotide to which it is not linked in nature. For purposes of this disclosure, it should be understood that “a nucleic acid molecule comprising” a particular nucleotide sequence does not encompass intact chromosomes. Isolated nucleic acid molecules “comprising” specified nucleic acid sequences may include, in addition to the specified sequences, coding sequences for up to ten or even up to twenty other proteins or portions thereof, or may include operably linked regulatory sequences that control expression of the coding region of the recited nucleic acid sequences, and/or may include vector sequences.

[0115] Unless specified otherwise, the left-hand end of any single-stranded polynucleotide sequence discussed herein is the 5′ end; the left-hand direction of double-stranded polynucleotide sequences is referred to as the 5′ direction. The direction of 5′ to 3′ addition of nascent RNA transcripts is referred to as the transcription direction; sequence regions on the DNA strand having the same sequence as the RNA transcript that are 5′ to the 5′ end of the RNA transcript are referred to as “upstream sequences;” sequence regions on the DNA strand having the same sequence as the RNA transcript that are 3′ to the 3′ end of the RNA transcript are referred to as “downstream sequences.”

[0116] The term “control sequence” refers to a polynucleotide sequence that can affect the expression and processing of coding sequences to which it is ligated. The nature of such control sequences may depend upon the host organism. In particular embodiments, control sequences for prokaryotes may include a promoter, a ribosomal binding site, and a transcription termination sequence. For example, control sequences for eukaryotes may include promoters comprising one or a plurality of recognition sites for transcription factors, transcription enhancer sequences, and transcription termination sequences. “Control sequences” can include leader sequences and/or fusion partner sequences.

[0117] The term “vector” means any molecule or entity (e.g., nucleic acid, plasmid, bacteriophage or virus) used to transfer protein coding information into a host cell.

[0118] The term “expression vector” or “expression construct” refers to a vector that is suitable for transformation of a host cell and contains nucleic acid sequences that direct and/or control (in conjunction with the host cell) expression of one or more heterologous coding regions operatively linked thereto. An expression construct may include, but is not limited to, sequences that affect or control transcription, translation, and, if introns are present, affect RNA splicing of a coding region operably linked thereto.

[0119] As used herein, “operably linked” means that the components to which the term is applied are in a relationship that allows them to carry out their inherent functions under suitable conditions. For example, a control sequence in a vector that is “operably linked” to a protein coding sequence is ligated thereto so that expression of the protein coding sequence is achieved under conditions compatible with the transcriptional activity of the control sequences.

[0120] The term “host cell” means a cell that has been transformed with a nucleic acid sequence and thereby expresses a gene of interest. The term includes the progeny of the parent cell, whether or not the progeny is identical in morphology or in genetic make-up to the original parent cell, so long as the gene of interest is present.

[0121] The terms “polypeptide” or “protein” are used interchangeably herein to refer to a polymer of amino acid residues. The terms also apply to amino acid polymers in which one or more amino acid residues is an analog or mimetic of a corresponding naturally occurring amino acid, as well as to naturally occurring amino acid polymers. The terms can also encompass amino acid polymers that have been modified, e.g., by the addition of carbohydrate residues to form glycoproteins, or phosphorylated. Polypeptides and proteins can be produced by a naturally-occurring and non-recombinant cell; or it is produced by a genetically-engineered or recombinant cell, and comprise molecules having the amino acid sequence of the native protein, or molecules having deletions from, additions to, and/or substitutions of one or more amino acids of the native sequence. The terms “polypeptide” and “protein” specifically encompass GIPR antigen binding proteins, antibodies, or sequences that have deletions from, additions to, and/or substitutions of one or more amino acids of an antigen-binding protein. The term “polypeptide fragment” refers to a polypeptide that has an amino-terminal deletion, a carboxyl-terminal deletion, and/or an internal deletion as compared with the full-length protein. Such fragments may also contain modified amino acids as compared with the full-length protein. In certain embodiments, fragments are about five to 500 amino acids long. For example, fragments may be at least 5, 6, 8, 10, 14, 20, 50, 70, 100, 110, 150, 200, 250, 300, 350, 400, or 450 amino acids long. Useful polypeptide fragments include immunologically functional fragments of antibodies, including binding domains.

[0122] The term “isolated protein” means that a subject protein (1) is free of at least some other proteins with which it would normally be found, (2) is essentially free of other proteins from the same source, e.g., from the same species, (3) is expressed by a cell from a different species, (4) has been separated from at least about 50 percent of polynucleotides, lipids, carbohydrates, or other materials with which it is associated in nature, (5) is operably associated (by covalent or noncovalent interaction) with a polypeptide with which it is not associated in nature, or (6) does not occur in nature. Typically, an “isolated protein” constitutes at least about 5%, at least about 10%, at least about 25%, or at least about 50% of a given sample. Genomic DNA, cDNA, mRNA or other RNA, of synthetic origin, or any combination thereof may encode such an isolated protein. Preferably, the isolated protein is substantially free from proteins or polypeptides or other contaminants that are found in its natural environment that would interfere with its therapeutic, diagnostic, prophylactic, research or other use.

[0123] A “variant” of a polypeptide (e.g., an antigen binding protein such as an antibody) comprises an amino acid sequence wherein one or more amino acid residues are inserted into, deleted from and/or substituted into the amino acid sequence relative to another polypeptide sequence. Variants include fusion proteins.

[0124] A “derivative” of a polypeptide is a polypeptide (e.g., an antigen binding protein such as an antibody) that has been chemically modified in some manner distinct from insertion, deletion, or substitution variants, e.g., via conjugation to another chemical moiety.

[0125] The term “naturally occurring” as used throughout the specification in connection with biological materials such as polypeptides, nucleic acids, host cells, and the like, refers to materials which are found in nature.

[0126] A “subject” or “patient” as used herein can be any mammal. In a typical embodiment, the subject or patient is a human.

[0127] As disclosed herein, a GIPR polypeptide described by the instant disclosure can be engineered and/or produced using standard molecular biology methodology. In various examples, a nucleic acid sequence encoding a GIPR, which can comprise all or a portion of SEQ ID NOs:1, 3 or 5, can be isolated and/or amplified from genomic DNA, or cDNA using appropriate oligonucleotide primers. Primers can be designed based on the nucleic and amino acid sequences provided herein according to standard (RT)-PCR amplification techniques. The amplified GIPR nucleic acid can then be cloned into a suitable vector and characterized by DNA sequence analysis.

[0128] Oligonucleotides for use as probes in isolating or amplifying all or a portion of the GIPR sequences provided herein can be designed and generated using standard synthetic techniques, e.g., automated DNA synthesis apparatus, or can be isolated from a longer sequence of DNA.

[0129] The 466 amino acid sequence of human GIPR is (Volz et al., FEBS Lett. 373:23-29 (1995); NCBI Reference Sequence: NP_0001555):

(SEQ ID NO: 3141)
MTTSPILQLL LRLSLCGLLL QRAETGSKGQ TAGELYORWE
RYRRECQETL AAAEPPSGLA CNGSFDMYVC WDYAAPNATA
RASCPWYLPW HHHVAAGFVL RQCGSDGQWG LWRDHTQCEN
PEKNEAFLDQ RLILERLQVM YTVGYSLSLA TLLLALLILS
LFRRLHCTRN YIHINLFTSF MLRAAAILSR DRLLPRPGPY
LGDQALALWN QALAACRTAQ IVTQYCVGAN YTWLLVEGVY
LHSLLVLVGG SEEGHFRYYL LLGWGAPALF VIPWVIVRYL
YENTQCWERN EVKAIWWIIR TPILMTILIN FLIFIRILGI
LLSKLRTRQM RCRDYRLRLA RSTLTLVPLL GVHEVVFAPV
TEEQARGALR FAKLGFEIFL SSFQGFLVSV LYCFINKEVQ
SEIRRGWHHC RLRRSLGEEQ RQLPERAFRA LPSGSGPGEV
PTSRGLSSGT LPGPGNEASR ELESYC

[0130] and is encoded by the DNA sequence (NCBI Reference Sequence: NM_000164):

(SEQ ID NO: 3142)
ggcagcggtg gcaggggctg caggagcaag tgaccaggag caggactggg
gacaggcctg atcgcccctg cacgaaccag acccttcgcc gccctcacga
tgactacctc tccgatcctg cagctgctgc tgcggctctc actgtgcggg
ctgctgctcc agagggcgga gacaggctct aaggggcaga cggcggggga
gctgtaccag cgctgggaac ggtaccgcag ggagtgccag gagaccttgg
cagccgcgga accgccttca ggcctcgcct gtaacgggtc cttcgatatg
tacgtctgct gggactatgc tgcacccaat gccactgccc gtgcgtcctg
cccctggtac ctgccctggc accaccatgt ggctgcaggt ttcgtcctcc
gccagtgtgg cagtgatggc caatggggac tttggagaga ccatacacaa
tgtgagaacc cagagaagaa tgaggccttt ctggaccaaa ggctcatctt
ggagcggttg caggtcatgt acactgtcgg ctactccctg tctctcgcca
cactgctgct agccctgctc atcttgagtt tgttcaggcg gctacattgc
actagaaact atatccacat caacctgttc acgtctttca tgctgcgagc
tgcggccatt ctcagccgag accgtctgct acctcgacct ggcccctacc
ttggggacca ggcccttgcg ctgtggaacc aggccctcgc tgcctgccgc
acggcccaga tcgtgaccca gtactgcgtg ggtgccaact acacgtggct
gctggtggag ggcgtctacc tgcacagtct cctggtgctc gtgggaggct
ccgaggaggg ccacttccgc tactacctgc tcctcggctg gggggccccc
gcgcttttcg tcattccctg ggtgatcgtc aggtacctgt acgagaacac
gcagtgctgg gagcgcaacg aagtcaaggc catttggtgg attatacgga
cccccatcct catgaccatc ttgattaatt tcctcatttt tatccgcatt
cttggcattc tcctgtccaa gctgaggaca cggcaaatgc gctgccggga
ttaccggctg aggctggctc gctccacgct gacgctggtg cccctgctgg
gtgtccacga ggtggtgttt gctcccgtga cagaggaaca ggcccggggc
gccctgcgct tcgccaagct cggctttgag atcttcctca gctccttcca
gggcttcctg gtcagcgtcc tctactgctt catcaacaag gaggtgcagt
cggagatccg ccgtggctgg caccactgcc gcctgcgccg cagcctgggc
gaggagcaac gccagctccc ggagcgcgcc ttccgggccc tgccctccgg
ctccggcccg ggcgaggtcc ccaccagccg cggcttgtcc tcggggaccc
tcccagggcc tgggaatgag gccagccggg agttggaaag ttactgctag
ggggcgggat ccccgtgtct gttcagttag catggattta ttgagtgcca
actgcgtgcc aggcccagta cggaggacgc tggggaaatg gtgaaggaaa
cagaaaaaag gtccctgccc ttctggagat gacaactgag tggggaaaac
agaccgtgaa cacaaaacat caagttccac acacgctatg gaatggttat
gaagggaagc gagaaggggg cctagggtgg tctgggaggc gtctccaagg
aggtgacact taagccatcc ccgaaagagg tgaaagagat cactttgggg
agagctggag aacaggattc taggcggaag cgatagcata ggcaaaggcc
cttgggcagg aaggcgctca gccttggctg gagtagaatt aagtcagagc
caacaggtgg ggagagacag agaagtgggc aggggcaccc aagttgggat
ttcatttcag gtgcattgga gattcttagg agtgtctctt gggggtaata
ttttattttt taaaaaatga ggat.

[0131] A 430 amino acid isoform of human GIPR (isoform X1), predicted by automated computational analysis, has the sequence (NCBI Reference Sequence XP 005258790):

(SEQ ID NO: 3143)
MTTSPILQLL LRLSLCGLLL QRAETGSKGQ TAGELYQRWE
RYRRECQETL AAAEPPSVAA GFVLRQCGSD GQWGLWRDHT
QCENPEKNEA FLDQRLILER LQVMYTVGYS LSLATLLLAL
LILSLFRRLH CTRNYIHINL FTSFMLRAAA ILSRDRLLPR
PGPYLGDQAL ALWNQALAAC RTAQIVTQYC VGANYTWLLV
EGVYLHSLLV LVGGSEEGHF RYYLLLGWGA PALFVIPWVI
VRYLYENTQC WERNEVKAIW WIIRTPILMT ILINFLIFIR
ILGILLSKLR TRQMRCRDYR LRLARSTLTL VPLLGVHEVV
FAPVTEEQAR GALRFAKLGF EIFLSSFQGF LVSVLYCFIN
KEVQSEIRRG WHHCRLRRSL GEEQRQLPER AFRALPSGSG
PGEVPTSRGL SSGTLPGPGN EASRELESYC

[0132] and is encoded by the DNA sequence:

(SEQ ID NO: 3144)
atgaccacca gcccgattct gcagctgctg ctgcgcctga gcctgtgcgg
cctgctgctg cagcgcgcgg aaaccggcag caaaggccag accgcgggcg
aactgtatca gcgctgggaa cgctatcgcc gcgaatgcca ggaaaccctg
gcggcggcgg aaccgccgag cgtggcggcg ggctttgtgc tgcgccagtg
cggcagcgat ggccagtggg gcctgtggcg cgatcatacc cagtgcgaaa
acccggaaaa aaacgaagcg tttctggatc agcgcctgat tctggaacgc
ctgcaggtga tgtataccgt gggctatagc ctgagcctgg cgaccctgct
gctggcgctg ctgattctga gcctgtttcg ccgcctgcat tgcacccgca
actatattca tattaacctg tttaccagct ttatgctgcg cgcggcggcg
attctgagcc gcgatcgcct gctgccgcgc ccgggcccgt atctgggcga
tcaggcgctg gcgctgtgga accaggcgct ggcggcgtgc cgcaccgcgc
agattgtgac ccagtattgc gtgggcgcga actatacctg gctgctggtg
gaaggcgtgt atctgcatag cctgctggtg ctggtgggcg gcagcgaaga
aggccatttt cgctattatc tgctgctggg ctggggcgcg ccggcgctgt
ttgtgattcc gtgggtgatt gtgcgctatc tgtatgaaaa cacccagtgc
tgggaacgca acgaagtgaa agcgatttgg tggattattc gcaccccgat
tctgatgacc attctgatta actttctgat ttttattcgc attctgggca
ttctgctgag caaactgcgc acccgccaga tgcgctgccg cgattatcgc
ctgcgcctgg cgcgcagcac cctgaccctg gtgccgctgc tgggcgtgca
tgaagtggtg tttgcgccgg tgaccgaaga acaggcgcgc ggcgcgctgc
gctttgcgaa actgggcttt gaaatttttc tgagcagctt tcagggcttt
ctggtgagcg tgctgtattg ctttattaac aaagaagtgc agagcgaaat
tcgccgcggc tggcatcatt gccgcctgcg ccgcagcctg ggcgaagaac
agcgccagct gccggaacgc gcgtttcgcg cgctgccgag cggcagcggc
ccgggcgaag tgccgaccag ccgcggcctg agcagcggca ccctgccggg
cccgggcaac gaagcgagcc gcgaactgga aagctattgc.

[0133] A 493 amino acid isoform of human GIPR, produced by alternative splicing, has the sequence (Gremlich et al., Diabetes 44:1202-8 (1995); UniProtKB Sequence Identifier: P48546-2):

(SEQ ID NO: 3145)
MTTSPILQLL LRLSLCGLLL QRAETGSKGQ TAGELYQRWE
RYRRECQETL AAAEPPSGLA CNGSFDMYVC WDYAAPNATA
RASCPWYLPW HHHVAAGFVL RQCGSDGQWG LWRDHTQCEN
PEKNEAFLDQ RLILERLQVM YTVGYSLSLA TLLLALLILS
LFRRLHCTRN YIHINLFTSF MLRAAAILSR DRLLPRPGPY
LGDQALALWN QALAACRTAQ IVTQYCVGAN YTWLLVEGVY
LHSLLVLVGG SEEGHFRYYL LLGWGAPALF VIPWVIVRYL
YENTQCWERN EVKAIWWIIR TPILMTILIN FLIFIRILGI
LLSKLRTRQM RCRDYRLRLA RSTLTLVPLL GVHEVVFAPV
TEEQARGALR FAKLGFEIFL SSFQGFLVSV LYCFINKEVG
RDPAAAPALW RRRGTAPPLS AIVSQVQSEI RRGWHHCRLR
RSLGEEQRQL PERAFRALPS GSGPGEVPTS RGLSSGTLPG
PGNEASRELE SYC

[0134] and is encoded by the DNA sequence:

(SEQ ID NO: 3146)
atgaccacca gcccgattct gcagctgctg ctgcgcctga gcctgtgcgg
cctgctgctg cagcgcgcgg aaaccggcag caaaggccag accgcgggcg
aactgtatca gcgctgggaa cgctatcgcc gcgaatgcca ggaaaccctg
gcggcggcgg aaccgccgag cggcctggcg tgcaacggca gctttgatat
gtatgtgtgc tgggattatg cggcgccgaa cgcgaccgcg cgcgcgagct
gcccgtggta tctgccgtgg catcatcatg tggcggcggg ctttgtgctg
cgccagtgcg gcagcgatgg ccagtggggc ctgtggcgcg atcataccca
gtgcgaaaac ccggaaaaaa acgaagcgtt tctggatcag cgcctgattc
tggaacgcct gcaggtgatg tataccgtgg gctatagcct gagcctggcg
accctgctgc tggcgctgct gattctgagc ctgtttcgcc gcctgcattg
cacccgcaac tatattcata ttaacctgtt taccagcttt atgctgcgcg
cggcggcgat tctgagccgc gatcgcctgc tgccgcgccc gggcccgtat
ctgggcgatc aggcgctggc gctgtggaac caggcgctgg cggcgtgccg
caccgcgcag attgtgaccc agtattgcgt gggcgcgaac tatacctggc
tgctggtgga aggcgtgtat ctgcatagcc tgctggtgct ggtgggcggc
agcgaagaag gccattttcg ctattatctg ctgctgggct ggggcgcgcc
ggcgctgttt gtgattccgt gggtgattgt gcgctatctg tatgaaaaca
cccagtgctg ggaacgcaac gaagtgaaag cgatttggtg gattattcgc
accccgattc tgatgaccat tctgattaac tttctgattt ttattcgcat
tctgggcatt ctgctgagca aactgcgcac ccgccagatg cgctgccgcg
attatcgcct gcgcctggcg cgcagcaccc tgaccctggt gccgctgctg
ggcgtgcatg aagtggtgtt tgcgccggtg accgaagaac aggcgcgcgg
cgcgctgcgc tttgcgaaac tgggctttga aatttttctg agcagctttc
agggctttct ggtgagcgtg ctgtattgct ttattaacaa agaagtgggc
cgcgatccgg cggcggcgcc ggcgctgtgg cgccgccgcg gcaccgcgcc
gccgctgagc gcgattgtga gccaggtgca gagcgaaatt cgccgcggct
ggcatcattg ccgcctgcgc cgcagcctgg gcgaagaaca gcgccagctg
ccggaacgcg cgtttcgcgc gctgccgage ggcagcggcc cgggcgaagt
gccgaccagc cgcggcctga gcagcggcac cctgccgggc ccgggcaacg
aagcgagccg cgaactggaa agctattgct aa

[0135] The 460 amino acid sequence of murine GIPR is (NCBI Reference Sequence: NP_001074284; uniprotKB/Swiss-Prot Q0P543-1); see Vassilatis et al., PNAS USA 2003, 100:4903-4908.

(SEQ ID NO: 3147)
MPLRLLLLLL WLWGLQWAET DSEGQTTTGE LYQRWEHYGQ
ECQKMLETTE PPSGLACNGS FDMYACWNYT AANTTARVSC
PWYLPWFRQV SAGEVFRQCG SDGQWGSWRD HTQCENPEKN
GAFQDQTLIL ERLQIMYTVG YSLSLTTLLL ALLILSLFRR
LHCTRNYIHM NLFTSFMLRA AAILTRDQLL PPLGPYTGDQ
APTPWNQALA ACRTAQIMTQ YCVGANYTWL LVEGVYLHHL
LVIVGRSEKG HERCYLLLGW GAPALFVIPW VIVRYLRENT
QCWERNEVKA IWWIIRTPIL ITILINFLIF IRILGILVSK
LRTRQMRCPD YRLRLARSTL TLVPLLGVHE VVFAPVTEEQ
VEGSLRFAKL AFEIFLSSFQ GFLVSVLYCFINKEVQSEIRQ
GWRHRRLRLS LQEQRPRPHQ ELAPRAVPLS SACREAAVGN
ALPSGMLHVP GDEVLESYC

[0136] and is encoded by the DNA sequence (NCBI Reference Sequence: NM_001080815):

(SEQ ID NO: 3148)
atgccgctgc gcctgctgct gctgctgctg tggctgtggg gcctgcagtg
ggcggaaacc gatagcgaag gccagaccac caccggcgaa ctgtatcagc
gctgggaaca ttatggccag gaatgccaga aaatgctgga aaccaccgaa
ccgccgagcg gcctggcgtg caacggcagc tttgatatgt atgcgtgctg
gaactatacc gcggcgaaca ccaccgcgcg cgtgagctgc ccgtggtatc
tgccgtggtt tcgccaggtg agcgcgggct ttgtgtttcg ccagtgcggc
agcgatggcc agtggggcag ctggcgcgat catacccagt gcgaaaaccc
ggaaaaaaac ggcgcgtttc aggatcagac cctgattctg gaacgcctgc
agattatgta taccgtgggc tatagcctga gcctgaccac cctgctgctg
gcgctgctga ttctgagcct gtttcgccgc ctgcattgca cccgcaacta
tattcatatg aacctgttta ccagctttat gctgcgcgcg gcggcgattc
tgacccgcga tcagctgctg ccgccgctgg gcccgtatac cggcgatcag
gcgccgaccc cgtggaacca ggcgctggcg gcgtgccgca ccgcgcagat
tatgacccag tattgcgtgg gcgcgaacta tacctggctg ctggtggaag
gcgtgtatct gcatcatctg ctggtgattg tgggccgcag cgaaaaaggc
cattttcgct gctatctgct gctgggctgg ggcgcgccgg cgctgtttgt
gattccgtgg gtgattgtgc gctatctgcg cgaaaacacc cagtgctggg
aacgcaacga agtgaaagcg atttggtgga ttattcgcac cccgattctg
attaccattc tgattaactt tctgattttt attcgcattc tgggcattct
ggtgagcaaa ctgcgcaccc gccagatgcg ctgcccggat tatcgcctgc
gcctggcgcg cagcaccctg accctggtgc cgctgctggg cgtgcatgaa
gtggtgtttg cgccggtgac cgaagaacag gtggaaggca gcctgcgctt
tgcgaaactg gcgtttgaaa tttttctgag cagctttcag ggctttctgg
tgagcgtgct gtattgcttt attaacaaag aagtgcagag cgaaattcgc
cagggctggc gccatcgccg cctgcgcctg agcctgcagg aacagcgccc
gcgcccgcat caggaactgg cgccgcgcgc ggtgccgctg agcagcgcgt
gccgcgaagc ggcggtgggc aacgcgctgc cgagcggcat gctgcatgtg
ccgggcgatg aagtgctgga aagctattgc taa

[0137] A 230 amino acid isoform of murine GIPR, produced by alternative splicing, has the sequence (Gerhard et al., Genome Res, 14:2121-2127 (2004); NCBI Reference Sequence: AAI20674):

(SEQ ID NO: 3149)
MPLRLLLLLL WLWGLQWAET DSEGQTTTGE LYQRWEHYGQ
ECQKMLETTE PPSGLACNGS FDMYACWNYT AANTTARVSC
PWYLPWFRQV SAGFVFRQCG SDGQWGSWRD HTQCENPEKN
GAFQDQTLIL ERLQIMYTVG YSLSLTTLLL ALLILSLERR
LHCTRNYIHM NLFTSFMLRA AAILTRDQLL PPLGPYTGDQ
APTPWNQVLH RLLPGGTKTF PIYERTFPHH

[0138] and is encoded by the DNA sequence:

(SEQ ID NO: 3150)
atgccgctgc gcctgctgct gctgctgctg tggctgtggg gcctgcagtg
ggcggaaacc gatagcgaag gccagaccac caccggcgaa ctgtatcagc
gctgggaaca ttatggccag gaatgccaga aaatgctgga aaccaccgaa
ccgccgagcg gcctggcgtg caacggcagc tttgatatgt atgcgtgctg
gaactatacc gcggcgaaca ccaccgcgcg cgtgagctgc ccgtggtatc
tgccgtggtt tcgccaggtg agcgcgggct ttgtgtttcg ccagtgcggc
agcgatggcc agtggggcag ctggcgcgat catacccagt gcgaaaaccc
ggaaaaaaac ggcgcgtttc aggatcagac cctgattctg gaacgcctgc
agattatgta taccgtgggc tatagcctga gcctgaccac cctgctgctg
gcgctgctga ttctgagcct gtttcgccgc ctgcattgca cccgcaacta
tattcatatg aacctgttta ccagctttat gctgcgcgcg gcggcgattc
tgacccgcga tcagctgctg ccgccgctgg gcccgtatac cggcgatcag
gcgccgaccc cgtggaacca ggtgctgcat cgcctgctgc cgggggcac
caaaaccttt ccgatttatt ttcgcacctt tccgcatcat taa.

[0139] As stated herein, the term “GIPR polypeptide” encompasses naturally occurring GIPR polypeptide sequences, e.g., human amino acid sequences SEQ ID NOs: 3141, 3143 or 3145. The term “GIPR polypeptide,” however, also encompasses polypeptides comprising an amino acid sequence that differs from the amino acid sequence of a naturally occurring GIPR polypeptide sequence, e.g., SEQ ID NOs: 3141, 3143 or 3145, by one or more amino acids, such that the sequence is at least 90% identical to SEQ ID NOs: 3141, 3143 or 3145. GIPR polypeptides can be generated by introducing one or more amino acid substitutions, either conservative or non-conservative and using naturally or non-naturally occurring amino acids, at particular positions of the GIPR polypeptide.

[0140] A “conservative amino acid substitution” can involve a substitution of a native amino acid residue (i.e., a residue found in a given position of the wild-type GIPR polypeptide sequence) with a nonnative residue (i.e., a residue that is not found in a given position of the wild-type GIPR polypeptide sequence) such that there is little or no effect on the polarity or charge of the amino acid residue at that position. Conservative amino acid substitutions also encompass non-naturally occurring amino acid residues that are typically incorporated by chemical peptide synthesis rather than by synthesis in biological systems. These include peptidomimetics, and other reversed or inverted forms of amino acid moieties.

[0141] Naturally occurring residues can be divided into classes based on common side chain properties:
[0142] (1) hydrophobic: norleucine, Met, Ala, Val, Leu, Ile;
[0143] (2) neutral hydrophilic: Cys, Ser, Thr;
[0144] (3) acidic: Asp, Glu;
[0145] (4) basic: Asn, Gln, His, Lys, Arg;
[0146] (5) residues that influence chain orientation: Gly, Pro; and
[0147] (6) aromatic: Trp, Tyr, Phe.

[0148] Additional groups of amino acids can also be formulated using the principles described in, e.g., Creighton (1984) PROTEINS: STRUCTURE AND MOLECULAR PROPERTIES (2d Ed. 1993), W.H. Freeman and Company. In some instances it can be useful to further characterize substitutions based on two or more of such features (e.g., substitution with a “small polar” residue, such as a Thr residue, can represent a highly conservative substitution in an appropriate context).

[0149] Conservative substitutions can involve the exchange of a member of one of these classes for another member of the same class. Non-conservative substitutions can involve the exchange of a member of one of these classes for a member from another class.

[0150] Synthetic, rare, or modified amino acid residues having known similar physiochemical properties to those of an above-described grouping can be used as a “conservative” substitute for a particular amino acid residue in a sequence. For example, a D-Arg residue may serve as a substitute for a typical L-Arg residue. It also can be the case that a particular substitution can be described in terms of two or more of the above described classes (e.g., a substitution with a small and hydrophobic residue means substituting one amino acid with a residue(s) that is found in both of the above-described classes or other synthetic, rare, or modified residues that are known in the art to have similar physiochemical properties to such residues meeting both definitions).

[0151] Nucleic acid sequences encoding a GIPR polypeptide provided herein, including those degenerate to SEQ ID NOs: 3141, 3143 or 3145, and those encoding polypeptide variants of SEQ ID NOs: 3141, 3143 or 3145 form other aspects of the instant disclosure.

[0152] In order to express the GIPR nucleic acid sequences provided herein, the appropriate coding sequences, e.g., SEQ ID NOs: 3141, 3143 or 3145, can be cloned into a suitable vector and after introduction in a suitable host, the sequence can be expressed to produce the encoded polypeptide according to standard cloning and expression techniques, which are known in the art (e.g., as described in Sambrook, J., Fritsh, E. F., and Maniatis, T. Molecular Cloning: A Laboratory Manual 2nd, ed., Cold Spring Harbor Laboratory, Cold Spring Harbor Laboratory Press, Cold Spring Harbor, N.Y., 1989). The invention also relates to such vectors comprising a nucleic acid sequence according to the invention.

[0153] A “vector” refers to a delivery vehicle that (a) promotes the expression of a polypeptide-encoding nucleic acid sequence; (b) promotes the production of the polypeptide therefrom; (c) promotes the transfection/transformation of target cells therewith; (d) promotes the replication of the nucleic acid sequence; (e) promotes stability of the nucleic acid; (f) promotes detection of the nucleic acid and/or transformed/transfected cells; and/or (g) otherwise imparts advantageous biological and/or physiochemical function to the polypeptide-encoding nucleic acid. A vector can be any suitable vector, including chromosomal, non-chromosomal, and synthetic nucleic acid vectors (a nucleic acid sequence comprising a suitable set of expression control elements). Examples of such vectors include derivatives of SV40, bacterial plasmids, phage DNA, baculovirus, yeast plasmids, vectors derived from combinations of plasmids and phage DNA, and viral nucleic acid (RNA or DNA) vectors.

[0154] A recombinant expression vector can be designed for expression of a GIPR protein in prokaryotic (e.g., E. coli) or eukaryotic cells (e.g., insect cells, using baculovirus expression vectors, yeast cells, or mammalian cells). In one embodiment the host cell is a mammalian, non-human host cell. Representative host cells include those hosts typically used for cloning and expression, including Escherichia coli strains TOP10F′, TOP10, DH10B, DH5a, HB101, W3110, BL21(DE3) and BL21 (DE3)pLysS, BLUESCRIPT (Stratagene), mammalian cell lines CHO, CHO-KI, HEK293, 293-EBNA pIN vectors (Van Heeke & Schuster, J. Biol. Chem. 264: 5503-5509 (1989); pET vectors (Novagen, Madison Wis.). Alternatively, the recombinant expression vector can be transcribed and translated in vitro, for example using T7 promoter regulatory sequences and T7 polymerase and an in vitro translation system. Preferably, the vector contains a promoter upstream of the cloning site containing the nucleic acid sequence encoding the polypeptide. Examples of promoters, which can be switched on and off, include the lac promoter, the T7 promoter, the trc promoter, the tac promoter and the trp promoter.

[0155] Thus, provided herein are vectors comprising a nucleic acid sequence encoding GIPR that facilitate the expression of recombinant GIPR. In various embodiments, the vectors comprise an operably linked nucleotide sequence which regulates the expression of GIPR. A vector can comprise or be associated with any suitable promoter, enhancer, and other expression-facilitating elements. Examples of such elements include strong expression promoters (e.g., a human CMV IE promoter/enhancer, an RSV promoter, SV40 promoter, SL3-3 promoter, MMTV promoter, or HIV LTR promoter, EF1alpha promoter, CAG promoter), effective poly (A) termination sequences, an origin of replication for plasmid product in E. coli, an antibiotic resistance gene as a selectable marker, and/or a convenient cloning site (e.g., a polylinker). Vectors also can comprise an inducible promoter as opposed to a constitutive promoter such as CMV IE. In one aspect, a nucleic acid comprising a sequence encoding a GIPR polypeptide which is operatively linked to a tissue specific promoter which promotes expression of the sequence in a metabolically-relevant tissue, such as liver or pancreatic tissue is provided.

[0156] In another aspect of the instant disclosure, host cells comprising the GIPR nucleic acids and vectors disclosed herein are provided. In various embodiments, the vector or nucleic acid is integrated into the host cell genome, which in other embodiments the vector or nucleic acid is extra-chromosomal.

[0157] Recombinant cells, such as yeast, bacterial (e.g., E. coli), and mammalian cells (e.g., immortalized mammalian cells) comprising such a nucleic acid, vector, or combinations of either or both thereof are provided. In various embodiments cells comprising a non-integrated nucleic acid, such as a plasmid, cosmid, phagemid, or linear expression element, which comprises a sequence coding for expression of a GIPR polypeptide, are provided.

[0158] A vector comprising a nucleic acid sequence encoding a GIPR polypeptide provided herein can be introduced into a host cell by transformation or by transfection. Methods of transforming a cell with an expression vector are well known.

[0159] A GIPR-encoding nucleic acid can be positioned in and/or delivered to a host cell or host animal via a viral vector. Any suitable viral vector can be used in this capacity. A viral vector can comprise any number of viral polynucleotides, alone or in combination with one or more viral proteins, which facilitate delivery, replication, and/or expression of the nucleic acid of the invention in a desired host cell. The viral vector can be a polynucleotide comprising all or part of a viral genome, a viral protein/nucleic acid conjugate, a virus-like particle (VLP), or an intact virus particle comprising viral nucleic acids and a GIPR polypeptide-encoding nucleic acid. A viral particle viral vector can comprise a wild-type viral particle or a modified viral particle. The viral vector can be a vector which requires the presence of another vector or wild-type virus for replication and/or expression (e.g., a viral vector can be a helper-dependent virus), such as an adenoviral vector amplicon. Typically, such viral vectors consist of a wild-type viral particle, or a viral particle modified in its protein and/or nucleic acid content to increase transgene capacity or aid in transfection and/or expression of the nucleic acid (examples of such vectors include the herpes virus/AAV amplicons). Typically, a viral vector is similar to and/or derived from a virus that normally infects humans. Suitable viral vector particles in this respect, include, for example, adenoviral vector particles (including any virus of or derived from a virus of the adenoviridae), adeno-associated viral vector particles (AAV vector particles) or other parvoviruses and parvoviral vector particles, papillomaviral vector particles, flaviviral vectors, alphaviral vectors, herpes viral vectors, pox virus vectors, retroviral vectors, including lentiviral vectors.

[0160] A GIPR polypeptide expressed as described herein can be isolated using standard protein purification methods. A GIPR polypeptide can be isolated from a cell in which is it naturally expressed or it can be isolated from a cell that has been engineered to express GIPR, for example a cell that does not naturally express GIPR.

[0161] Protein purification methods that can be employed to isolate a GIPR polypeptide, as well as associated materials and reagents, are known in the art. Additional purification methods that may be useful for isolating a GIPR polypeptide can be found in references such as Bootcov M R, 1997, Proc. Natl. Acad. Sci. USA 94:11514-9, Fairlie W D, 2000, Gene 254: 67-76.

[0162] Antagonist antigen binding proteins that bind GIPR, including human GIPR (hGIPR) are provided herein. In one embodiment, the human GIPR has the sequence as such as set forth in SEQ ID NO: 3141. In another embodiment, the human GIPR has the sequence as such set forth in SEQ ID NO: 3143. In another embodiment, the human GIPR has the sequence as such set forth in SEQ ID NO: 3145.

[0163] In one aspect the present invention is directed to a composition comprising an antibody or functional fragment thereof that specifically binds to human GIPR, wherein the antibody or functional fragment thereof comprises a cysteine or non-canonical amino acid amino acid substitution at one or more conjugation site(s); and a GLP-1 receptor agonist, wherein the GLP-1 receptor agonist is conjugated to the antibody or functional fragment thereof through the side-chain of the cysteine residue or non-canonical amino acid residue substituted at the one or more conjugation site(s).

[0164] The antigen binding proteins provided are polypeptides into which one or more complementary determining regions (CDRs), as described herein, are embedded and/or joined. In some antigen binding proteins, the CDRs are embedded into a “framework” region, which orients the CDR(s) such that the proper antigen binding properties of the CDR(s) are achieved. Certain antigen binding proteins described herein are antibodies or are derived from antibodies. In other antigen binding proteins, the CDR sequences are embedded in a different type of protein scaffold. The various structures are further described below.

[0165] The antigen binding proteins that are disclosed herein have a variety of utilities. The antigen binding proteins, for instance, are useful in specific binding assays, affinity purification of GIPR, and in screening assays to identify other antagonists of GIPR activity. Other uses for the antigen binding proteins include, for example, diagnosis of GIPR-associated diseases or conditions and screening assays to determine the presence or absence of GIPR. Given that the antigen binding proteins that are provided are antagonists, the GIPR antigen binding proteins have value in therapeutic methods in which it is useful to reduce weight gain, even while maintaining or increasing food intake, increasing % fat mass and increasing % lean mass, improving glucose tolerance, decreasing insulin levels, decreasing cholesterol and triglyceride levels. Accordingly, the antigen binding proteins have utility in the treatment and prevention of diabetes, e.g., type 2 diabetes, obesity, dyslipidemia, elevated glucose levels or elevated insulin levels.

[0166] A variety of selective binding agents useful for modulating the activity of GIPR are provided. These agents include, for instance, antigen binding proteins that contain an antigen binding domain (e.g., scFvs, domain antibodies, and polypeptides with an antigen binding region) and specifically bind to a GIPR polypeptide, in particular human GIPR. Some of the agents, for example, are useful in enhancing the activity of GIPR, and can activate one or more activities associated with GIPR.

[0167] In general the antigen binding proteins that are provided typically comprise one or more CDRs as described herein (e.g., 1, 2, 3, 4, 5 or 6). In some instances, the antigen binding protein comprises (a) a polypeptide structure and (b) one or more CDRs that are inserted into and/or joined to the polypeptide structure. The polypeptide structure can take a variety of different forms. For example, it can be, or comprise, the framework of a naturally occurring antibody, or fragment or variant thereof, or may be completely synthetic in nature. Examples of various polypeptide structures are further described below.

[0168] In certain embodiments, the polypeptide structure of the antigen binding proteins is an antibody or is derived from an antibody. Accordingly, examples of certain antigen binding proteins that are provided include, but are not limited to, monoclonal antibodies, bispecific antibodies, minibodies, domain antibodies such as Nanobodies®, synthetic antibodies (sometimes referred to herein as “antibody mimetics”), chimeric antibodies, humanized antibodies, human antibodies, antibody fusions, and portions or fragments of each, respectively. In some instances, the antigen binding protein is an immunological fragment of a complete antibody (e.g., a Fab, a Fab′, a F(ab′)2). In other instances the antigen binding protein is a scFv that uses CDRs from an antibody of the present invention.

[0169] The antigen binding proteins as provided herein specifically bind to a human GIPR. In a specific embodiment, the antigen binding protein specifically binds to human GIPR comprising or consisting of the amino acid sequence of SEQ ID NO: 3141. In a specific embodiment, the antigen binding protein specifically binds to human GIPR comprising or consisting of the amino acid sequence of SEQ ID NO: 3143. In a specific embodiment, the antigen binding protein specifically binds to human GIPR comprising or consisting of the amino acid sequence of SEQ ID NO: 3145.

[0170] The antigen binding proteins that are provided are antagonists and typically have one, two, three, four, five, six, seven or all eight of the following characteristics:
[0171] (a) ability to prevent or reduce binding of GIP to GIPR, where the levels can be measured, for example, by the methods such as radioactive- or fluorescence-labeled ligand binding study, or by the methods described herein (e.g. cAMP assay or other functional assays). The decrease can be at least 10, 25, 50, 100% or more relative to the pre-treatment levels of SEQ ID NO: 3141, 3143 or 3145 under comparable conditions.
[0172] (b) ability to decrease blood glucose;
[0173] (c) ability to increase glucose tolerance;
[0174] (d) ability to increase insulin sensitivity;
[0175] (e) ability to decrease body weight or reduce body weight gain;
[0176] (f) ability to decrease fat mass or decrease inflammation in fat tissue;
[0177] (g) ability to decrease fasting insulin levels;
[0178] (h) ability to decrease circulating cholesterol levels;
[0179] (i) ability to decrease circulating triglyceride levels;
[0180] (j) ability to decrease liver steatosis or reduce triglyceride level in liver;
[0181] (k) decrease AST, ALT, and/or ALP levels.

[0182] In one embodiment, a GIPR antigen binding protein has one or more of the following activities:
[0183] (a) binds human GIPR such that KD is ≤200 nM, is ≤150 nM, is ≤100 nM, is ≤50 nM, is ≤10 nM, is ≤5 nM, is ≤2 nM, or is ≤1 nM, e.g., as measured via a surface plasma resonance or kinetic exclusion assay technique.
[0184] (b) has a half-life in human serum of at least 3 days;

[0185] Some antigen binding proteins that are provided have an on-rate (ka) for GIPR of at least 10⁴/M×seconds, at least 10⁵/M×seconds, or at least 10⁶/M×seconds as measured, for instance, as described below. Certain antigen binding proteins that are provided have a slow dissociation rate or off-rate. Some antigen binding proteins, for instance, have a kd (off-rate) of 1×10⁻² s⁻¹, or 1×10⁻³ s⁻¹, or 1×10⁻⁴ s⁻¹, or 1×10⁻⁵ s⁻¹. In certain embodiments, the antigen binding protein has a KD (equilibrium binding affinity) of less than 25 pM, 50 pM, 100 pM, 500 pM, 1 nM, 5 nM, 10 nM, 25 nM or 50 nM.

[0186] In another aspect, an antigen-binding protein is provided having a half-life of at least one day in vitro or in vivo (e.g., when administered to a human subject). In one embodiment, the antigen binding protein has a half-life of at least three days. In various other embodiments, the antigen binding protein has a half-life of 4, 5, 6, 7, 8, 9, 10, 15, 20, 25, 30, 40, 50, or 60 days or longer. In another embodiment, the antigen binding protein is derivatized or modified such that it has a longer half-life as compared to the underivatized or unmodified antibody. In another embodiment, the antigen binding protein contains point mutations to increase serum half-life. Further details regarding such mutant and derivatized forms are provided below.

[0187] Some of the antigen binding proteins that are provided have the structure typically associated with naturally occurring antibodies. The structural units of these antibodies typically comprise one or more tetramers, each composed of two identical couplets of polypeptide chains, though some species of mammals also produce antibodies having only a single heavy chain. In a typical antibody, each pair or couplet includes one full-length “light” chain (in certain embodiments, about 25 kDa) and one full-length “heavy” chain (in certain embodiments, about 50-70 kDa). Each individual immunoglobulin chain is composed of several “immunoglobulin domains”, each consisting of roughly 90 to 110 amino acids and expressing a characteristic folding pattern. These domains are the basic units of which antibody polypeptides are composed. The amino-terminal portion of each chain typically includes a variable domain that is responsible for antigen recognition. The carboxy-terminal portion is more conserved evolutionarily than the other end of the chain and is referred to as the “constant region” or “C region”. Human light chains generally are classified as kappa and lambda light chains, and each of these contains one variable domain and one constant domain. Heavy chains are typically classified as mu, delta, gamma, alpha, or epsilon chains, and these define the antibody's isotype as IgM, IgD, IgG, IgA, and IgE, respectively. IgG has several subtypes, including, but not limited to, IgG1, IgG2, IgG3, and IgG4. IgM subtypes include IgM, and IgM2. IgA subtypes include IgA1 and IgA2. In humans, the IgA and IgD isotypes contain four heavy chains and four light chains; the IgG and IgE isotypes contain two heavy chains and two light chains; and the IgM isotype contains five heavy chains and five light chains. The heavy chain C region typically comprises one or more domains that may be responsible for effector function. The number of heavy chain constant region domains will depend on the isotype. IgG heavy chains, for example, each contain three C region domains known as CH1, CH2 and CH3. The antibodies that are provided can have any of these isotypes and subtypes. In certain embodiments, the GIPR antibody is of the IgG1, IgG2, or IgG4 subtype. The terms “GIPR antibody” and “anti-GIPR antibody” are used interchangeably throughout this application and figures. Both terms refer to an antibody that binds to GIPR.

[0188] In full-length light and heavy chains, the variable and constant regions are joined by a “J” region of about twelve or more amino acids, with the heavy chain also including a “D” region of about ten more amino acids. See, e.g. Fundamental Immunology, 2nd ed., Ch. 7 (Paul, W., ed.) 1989, New York: Raven Press (hereby incorporated by reference in its entirety for all purposes). The variable regions of each light/heavy chain pair typically form the antigen binding site.

[0189] For the antibodies provided herein, the variable regions of immunoglobulin chains generally exhibit the same overall structure, comprising relatively conserved framework regions (FR) joined by three hypervariable regions, more often called “complementarity determining regions” or CDRs. The CDRs from the two chains of each heavy chain/light chain pair mentioned above typically are aligned by the framework regions to form a structure that binds specifically with a specific epitope on GIPR. From N-terminal to C-terminal, naturally-occurring light and heavy chain variable regions both typically conform with the following order of these elements: FR1, CDR1, FR2, CDR2, FR3, CDR3 and FR4. A numbering system has been devised for assigning numbers to amino acids that occupy positions in each of these domains. This numbering system is defined in Kabat Sequences of Proteins of Immunological Interest (1987 and 1991, NIH, Bethesda, Md.), or Chothia & Lesk, 1987, J. Mol. Biol. 196:901-917; Chothia et al., 1989, Nature 342:878-883.

[0190] The sequence information for specific antibodies prepared and identified as described in the Examples below is summarized in TABLE 1. Thus, in an embodiment, an antigen binding protein is an antibody with the CDR, variable domain and light and heavy chain sequences as specified in one of the rows of TABLE 1.

[0191] SEQ ID NOs have been assigned to variable light chain, variable heavy chain, light chain, heavy chain, CDRL1, CDRL2, CDRL3, CDRH1, CDRH2, and CDRH3 sequences of the antibodies and fragments thereof of the present invention and are shown in TABLE 1. SEQ ID NOs have also been assigned to polynucleotides encoding the variable light chain, variable heavy chain, light chain, heavy chain, CDRL1, CDRL2, CDRL3, CDRH1, CDRH2, and CDRH3 sequences of the antibodies and fragments thereof of the present invention and are shown in TABLE 2. The antigen binding proteins of the present invention can be identified by SEQ ID NO, but also by construct name (e.g., 2C2.005) or identifier number (e.g., iPS:336175). The antigen binding proteins identified in Tables 1-5 below can be grouped into families based on construct name. For example, the “4B1 family” includes the constructs 4B1, 4B1.010, 4B1.011, 4B1.012, 4B1.013, 4B1.014, 4B1.015, and 4B1.016.

[0192] The various light chain and heavy chain variable regions provided herein are depicted in TABLE 3. Each of these variable regions may be attached to a heavy or light chain constant regions to form a complete antibody heavy and light chain, respectively. Furthermore, each of the so generated heavy and light chain sequences may be combined to form a complete antibody structure.

Lengthy table referenced here
US20250121056A1-20250417-T00001
Please refer to the end of the specification for access instructions.

Lengthy table referenced here
US20250121056A1-20250417-T00002
Please refer to the end of the specification for access instructions.

Lengthy table referenced here
US20250121056A1-20250417-T00003
Please refer to the end of the specification for access instructions.

Lengthy table referenced here
US20250121056A1-20250417-T00004
Please refer to the end of the specification for access instructions.

Lengthy table referenced here
US20250121056A1-20250417-T00005
Please refer to the end of the specification for access instructions.

[0193] In one embodiment the antibody or fragment thereof comprises a light chain variable region comprising a sequence selected from the group consisting of SEQ ID NOs: 1-157 and a heavy chain variable region comprising a sequence selected from the group consisting of SEQ ID NOs: 158-314, wherein the antibody or functional fragment thereof comprises a cysteine or non-canonical amino acid amino acid substitution at one or more conjugation site(s) selected from the group consisting of D70 of the antibody light chain relative to reference sequence SEQ ID NO: 455, E276 of the antibody heavy chain relative to reference sequence SEQ ID NO: 612, and T363 of the antibody heavy chain relative to reference sequence SEQ ID NO: 612.

[0194] In one embodiment the antibody or fragment thereof comprises a combination of light chain variable region and a heavy chain variable region selected from the group consisting of a light chain variable region comprising SEQ ID NO: 1 and a heavy chain variable region comprising SEQ ID NO: 158; a light chain variable region comprising SEQ ID NO: 2 and a heavy chain variable region comprising SEQ ID NO: 159; a light chain variable region comprising SEQ ID NO: 3 and a heavy chain variable region comprising SEQ ID NO: 160; a light chain variable region comprising SEQ ID NO: 4 and a heavy chain variable region comprising SEQ ID NO: 161; a light chain variable region comprising SEQ ID NO: 5 and a heavy chain variable region comprising SEQ ID NO: 162; a light chain variable region comprising SEQ ID NO: 6 and a heavy chain variable region comprising SEQ ID NO: 163; a light chain variable region comprising SEQ ID NO: 7 and a heavy chain variable region comprising SEQ ID NO: 164; a light chain variable region comprising SEQ ID NO: 8 and a heavy chain variable region comprising SEQ ID NO: 165; a light chain variable region comprising SEQ ID NO: 9 and a heavy chain variable region comprising SEQ ID NO: 166; a light chain variable region comprising SEQ ID NO: 10 and a heavy chain variable region comprising SEQ ID NO: 167; a light chain variable region comprising SEQ ID NO: 11 and a heavy chain variable region comprising SEQ ID NO: 168; a light chain variable region comprising SEQ ID NO: 12 and a heavy chain variable region comprising SEQ ID NO: 169; a light chain variable region comprising SEQ ID NO: 13 and a heavy chain variable region comprising SEQ ID NO: 170; a light chain variable region comprising SEQ ID NO: 14 and a heavy chain variable region comprising SEQ ID NO: 171; a light chain variable region comprising SEQ ID NO: 15 and a heavy chain variable region comprising SEQ ID NO: 172; a light chain variable region comprising SEQ ID NO: 16 and a heavy chain variable region comprising SEQ ID NO: 173; a light chain variable region comprising SEQ ID NO: 17 and a heavy chain variable region comprising SEQ ID NO: 174; a light chain variable region comprising SEQ ID NO: 18 and a heavy chain variable region comprising SEQ ID NO: 175; a light chain variable region comprising SEQ ID NO: 19 and a heavy chain variable region comprising SEQ ID NO: 176; a light chain variable region comprising SEQ ID NO: 20 and a heavy chain variable region comprising SEQ ID NO: 177; a light chain variable region comprising SEQ ID NO: 21 and a heavy chain variable region comprising SEQ ID NO: 178; a light chain variable region comprising SEQ ID NO: 22 and a heavy chain variable region comprising SEQ ID NO: 179; a light chain variable region comprising SEQ ID NO: 23 and a heavy chain variable region comprising SEQ ID NO: 180; a light chain variable region comprising SEQ ID NO: 24 and a heavy chain variable region comprising SEQ ID NO: 181; a light chain variable region comprising SEQ ID NO: 25 and a heavy chain variable region comprising SEQ ID NO: 182; a light chain variable region comprising SEQ ID NO: 26 and a heavy chain variable region comprising SEQ ID NO: 183; a light chain variable region comprising SEQ ID NO: 27 and a heavy chain variable region comprising SEQ ID NO: 184; a light chain variable region comprising SEQ ID NO: 28 and a heavy chain variable region comprising SEQ ID NO: 185; a light chain variable region comprising SEQ ID NO: 29 and a heavy chain variable region comprising SEQ ID NO: 186; a light chain variable region comprising SEQ ID NO: 30 and a heavy chain variable region comprising SEQ ID NO: 187; a light chain variable region comprising SEQ ID NO: 31 and a heavy chain variable region comprising SEQ ID NO: 188; a light chain variable region comprising SEQ ID NO: 32 and a heavy chain variable region comprising SEQ ID NO: 189; a light chain variable region comprising SEQ ID NO: 33 and a heavy chain variable region comprising SEQ ID NO: 190; a light chain variable region comprising SEQ ID NO: 34 and a heavy chain variable region comprising SEQ ID NO: 191; a light chain variable region comprising SEQ ID NO: 35 and a heavy chain variable region comprising SEQ ID NO: 192; a light chain variable region comprising SEQ ID NO: 36 and a heavy chain variable region comprising SEQ ID NO: 193; a light chain variable region comprising SEQ ID NO: 37 and a heavy chain variable region comprising SEQ ID NO: 194; a light chain variable region comprising SEQ ID NO: 38 and a heavy chain variable region comprising SEQ ID NO: 195; a light chain variable region comprising SEQ ID NO: 39 and a heavy chain variable region comprising SEQ ID NO: 196; a light chain variable region comprising SEQ ID NO: 40 and a heavy chain variable region comprising SEQ ID NO: 197; a light chain variable region comprising SEQ ID NO: 41 and a heavy chain variable region comprising SEQ ID NO: 198; a light chain variable region comprising SEQ ID NO: 42 and a heavy chain variable region comprising SEQ ID NO: 199; a light chain variable region comprising SEQ ID NO: 43 and a heavy chain variable region comprising SEQ ID NO: 200; a light chain variable region comprising SEQ ID NO: 44 and a heavy chain variable region comprising SEQ ID NO: 201; a light chain variable region comprising SEQ ID NO: 45 and a heavy chain variable region comprising SEQ ID NO: 202; a light chain variable region comprising SEQ ID NO: 46 and a heavy chain variable region comprising SEQ ID NO: 203; a light chain variable region comprising SEQ ID NO: 47 and a heavy chain variable region comprising SEQ ID NO: 204; a light chain variable region comprising SEQ ID NO: 48 and a heavy chain variable region comprising SEQ ID NO: 205; a light chain variable region comprising SEQ ID NO: 49 and a heavy chain variable region comprising SEQ ID NO: 206; a light chain variable region comprising SEQ ID NO: 50 and a heavy chain variable region comprising SEQ ID NO: 207; a light chain variable region comprising SEQ ID NO: 51 and a heavy chain variable region comprising SEQ ID NO: 208; a light chain variable region comprising SEQ ID NO: 52 and a heavy chain variable region comprising SEQ ID NO: 209; a light chain variable region comprising SEQ ID NO: 53 and a heavy chain variable region comprising SEQ ID NO: 210; a light chain variable region comprising SEQ ID NO: 54 and a heavy chain variable region comprising SEQ ID NO: 211; a light chain variable region comprising SEQ ID NO: 55 and a heavy chain variable region comprising SEQ ID NO: 212; a light chain variable region comprising SEQ ID NO: 56 and a heavy chain variable region comprising SEQ ID NO: 213; a light chain variable region comprising SEQ ID NO: 57 and a heavy chain variable region comprising SEQ ID NO: 214; a light chain variable region comprising SEQ ID NO: 58 and a heavy chain variable region comprising SEQ ID NO: 215; a light chain variable region comprising SEQ ID NO: 59 and a heavy chain variable region comprising SEQ ID NO: 216; a light chain variable region comprising SEQ ID NO: 60 and a heavy chain variable region comprising SEQ ID NO: 217; a light chain variable region comprising SEQ ID NO: 61 and a heavy chain variable region comprising SEQ ID NO: 218; a light chain variable region comprising SEQ ID NO: 62 and a heavy chain variable region comprising SEQ ID NO: 219; a light chain variable region comprising SEQ ID NO: 63 and a heavy chain variable region comprising SEQ ID NO: 220; a light chain variable region comprising SEQ ID NO: 64 and a heavy chain variable region comprising SEQ ID NO: 221; a light chain variable region comprising SEQ ID NO: 65 and a heavy chain variable region comprising SEQ ID NO: 222; a light chain variable region comprising SEQ ID NO: 66 and a heavy chain variable region comprising SEQ ID NO: 223; a light chain variable region comprising SEQ ID NO: 67 and a heavy chain variable region comprising SEQ ID NO: 224; a light chain variable region comprising SEQ ID NO: 68 and a heavy chain variable region comprising SEQ ID NO: 225; a light chain variable region comprising SEQ ID NO: 69 and a heavy chain variable region comprising SEQ ID NO: 226; a light chain variable region comprising SEQ ID NO: 70 and a heavy chain variable region comprising SEQ ID NO: 227; a light chain variable region comprising SEQ ID NO: 71 and a heavy chain variable region comprising SEQ ID NO: 228; a light chain variable region comprising SEQ ID NO: 72 and a heavy chain variable region comprising SEQ ID NO: 229; a light chain variable region comprising SEQ ID NO: 73 and a heavy chain variable region comprising SEQ ID NO: 230; a light chain variable region comprising SEQ ID NO: 74 and a heavy chain variable region comprising SEQ ID NO: 231; a light chain variable region comprising SEQ ID NO: 75 and a heavy chain variable region comprising SEQ ID NO: 232; a light chain variable region comprising SEQ ID NO: 76 and a heavy chain variable region comprising SEQ ID NO: 233; a light chain variable region comprising SEQ ID NO: 77 and a heavy chain variable region comprising SEQ ID NO: 234; a light chain variable region comprising SEQ ID NO: 78 and a heavy chain variable region comprising SEQ ID NO: 235; a light chain variable region comprising SEQ ID NO: 79 and a heavy chain variable region comprising SEQ ID NO: 236; a light chain variable region comprising SEQ ID NO: 80 and a heavy chain variable region comprising SEQ ID NO: 237; a light chain variable region comprising SEQ ID NO: 81 and a heavy chain variable region comprising SEQ ID NO: 238; a light chain variable region comprising SEQ ID NO: 82 and a heavy chain variable region comprising SEQ ID NO: 239; a light chain variable region comprising SEQ ID NO: 83 and a heavy chain variable region comprising SEQ ID NO: 240; a light chain variable region comprising SEQ ID NO: 84 and a heavy chain variable region comprising SEQ ID NO: 241; a light chain variable region comprising SEQ ID NO: 85 and a heavy chain variable region comprising SEQ ID NO: 242; a light chain variable region comprising SEQ ID NO: 86 and a heavy chain variable region comprising SEQ ID NO: 243; a light chain variable region comprising SEQ ID NO: 87 and a heavy chain variable region comprising SEQ ID NO: 244; a light chain variable region comprising SEQ ID NO: 88 and a heavy chain variable region comprising SEQ ID NO: 245; a light chain variable region comprising SEQ ID NO: 89 and a heavy chain variable region comprising SEQ ID NO: 246; a light chain variable region comprising SEQ ID NO: 90 and a heavy chain variable region comprising SEQ ID NO: 247; a light chain variable region comprising SEQ ID NO: 91 and a heavy chain variable region comprising SEQ ID NO: 248; a light chain variable region comprising SEQ ID NO: 92 and a heavy chain variable region comprising SEQ ID NO: 249; a light chain variable region comprising SEQ ID NO: 93 and a heavy chain variable region comprising SEQ ID NO: 250; a light chain variable region comprising SEQ ID NO: 94 and a heavy chain variable region comprising SEQ ID NO: 251; a light chain variable region comprising SEQ ID NO: 95 and a heavy chain variable region comprising SEQ ID NO: 252; a light chain variable region comprising SEQ ID NO: 96 and a heavy chain variable region comprising SEQ ID NO: 253; a light chain variable region comprising SEQ ID NO: 97 and a heavy chain variable region comprising SEQ ID NO: 254; a light chain variable region comprising SEQ ID NO: 98 and a heavy chain variable region comprising SEQ ID NO: 255; a light chain variable region comprising SEQ ID NO: 99 and a heavy chain variable region comprising SEQ ID NO: 256; a light chain variable region comprising SEQ ID NO: 100 and a heavy chain variable region comprising SEQ ID NO: 257; a light chain variable region comprising SEQ ID NO: 101 and a heavy chain variable region comprising SEQ ID NO: 258; a light chain variable region comprising SEQ ID NO: 102 and a heavy chain variable region comprising SEQ ID NO: 259; a light chain variable region comprising SEQ ID NO: 103 and a heavy chain variable region comprising SEQ ID NO: 260; a light chain variable region comprising SEQ ID NO: 104 and a heavy chain variable region comprising SEQ ID NO: 261; a light chain variable region comprising SEQ ID NO: 105 and a heavy chain variable region comprising SEQ ID NO: 262; a light chain variable region comprising SEQ ID NO: 106 and a heavy chain variable region comprising SEQ ID NO: 263; a light chain variable region comprising SEQ ID NO: 107 and a heavy chain variable region comprising SEQ ID NO: 264; a light chain variable region comprising SEQ ID NO: 108 and a heavy chain variable region comprising SEQ ID NO: 265; a light chain variable region comprising SEQ ID NO: 109 and a heavy chain variable region comprising SEQ ID NO: 266; a light chain variable region comprising SEQ ID NO: 110 and a heavy chain variable region comprising SEQ ID NO: 267; a light chain variable region comprising SEQ ID NO: 111 and a heavy chain variable region comprising SEQ ID NO: 268; a light chain variable region comprising SEQ ID NO: 112 and a heavy chain variable region comprising SEQ ID NO: 269; a light chain variable region comprising SEQ ID NO: 113 and a heavy chain variable region comprising SEQ ID NO: 270; a light chain variable region comprising SEQ ID NO: 114 and a heavy chain variable region comprising SEQ ID NO: 271; a light chain variable region comprising SEQ ID NO: 115 and a heavy chain variable region comprising SEQ ID NO: 272; a light chain variable region comprising SEQ ID NO: 116 and a heavy chain variable region comprising SEQ ID NO: 273; a light chain variable region comprising SEQ ID NO: 117 and a heavy chain variable region comprising SEQ ID NO: 274; a light chain variable region comprising SEQ ID NO: 118 and a heavy chain variable region comprising SEQ ID NO: 275; a light chain variable region comprising SEQ ID NO: 119 and a heavy chain variable region comprising SEQ ID NO: 276; a light chain variable region comprising SEQ ID NO: 120 and a heavy chain variable region comprising SEQ ID NO: 277; a light chain variable region comprising SEQ ID NO: 121 and a heavy chain variable region comprising SEQ ID NO: 278; a light chain variable region comprising SEQ ID NO: 122 and a heavy chain variable region comprising SEQ ID NO: 279; a light chain variable region comprising SEQ ID NO: 123 and a heavy chain variable region comprising SEQ ID NO: 280; a light chain variable region comprising SEQ ID NO: 124 and a heavy chain variable region comprising SEQ ID NO: 281; a light chain variable region comprising SEQ ID NO: 125 and a heavy chain variable region comprising SEQ ID NO: 282; a light chain variable region comprising SEQ ID NO: 126 and a heavy chain variable region comprising SEQ ID NO: 283; a light chain variable region comprising SEQ ID NO: 127 and a heavy chain variable region comprising SEQ ID NO: 284; a light chain variable region comprising SEQ ID NO: 128 and a heavy chain variable region comprising SEQ ID NO: 285; a light chain variable region comprising SEQ ID NO: 129 and a heavy chain variable region comprising SEQ ID NO: 286; a light chain variable region comprising SEQ ID NO: 130 and a heavy chain variable region comprising SEQ ID NO: 287; a light chain variable region comprising SEQ ID NO: 131 and a heavy chain variable region comprising SEQ ID NO: 288; a light chain variable region comprising SEQ ID NO: 132 and a heavy chain variable region comprising SEQ ID NO: 289; a light chain variable region comprising SEQ ID NO: 133 and a heavy chain variable region comprising SEQ ID NO: 290; a light chain variable region comprising SEQ ID NO: 134 and a heavy chain variable region comprising SEQ ID NO: 291; a light chain variable region comprising SEQ ID NO: 135 and a heavy chain variable region comprising SEQ ID NO: 292; a light chain variable region comprising SEQ ID NO: 136 and a heavy chain variable region comprising SEQ ID NO: 293; a light chain variable region comprising SEQ ID NO: 137 and a heavy chain variable region comprising SEQ ID NO: 294; a light chain variable region comprising SEQ ID NO: 138 and a heavy chain variable region comprising SEQ ID NO: 295; a light chain variable region comprising SEQ ID NO: 139 and a heavy chain variable region comprising SEQ ID NO: 296; a light chain variable region comprising SEQ ID NO: 140 and a heavy chain variable region comprising SEQ ID NO: 297; a light chain variable region comprising SEQ ID NO: 141 and a heavy chain variable region comprising SEQ ID NO: 298; a light chain variable region comprising SEQ ID NO: 142 and a heavy chain variable region comprising SEQ ID NO: 299; a light chain variable region comprising SEQ ID NO: 143 and a heavy chain variable region comprising SEQ ID NO: 300; a light chain variable region comprising SEQ ID NO: 144 and a heavy chain variable region comprising SEQ ID NO: 301; a light chain variable region comprising SEQ ID NO: 145 and a heavy chain variable region comprising SEQ ID NO: 302; a light chain variable region comprising SEQ ID NO: 146 and a heavy chain variable region comprising SEQ ID NO: 303; a light chain variable region comprising SEQ ID NO: 147 and a heavy chain variable region comprising SEQ ID NO: 304; a light chain variable region comprising SEQ ID NO: 148 and a heavy chain variable region comprising SEQ ID NO: 305; a light chain variable region comprising SEQ ID NO: 149 and a heavy chain variable region comprising SEQ ID NO: 306; a light chain variable region comprising SEQ ID NO: 150 and a heavy chain variable region comprising SEQ ID NO: 307; a light chain variable region comprising SEQ ID NO: 151 and a heavy chain variable region comprising SEQ ID NO: 308; a light chain variable region comprising SEQ ID NO: 152 and a heavy chain variable region comprising SEQ ID NO: 309; a light chain variable region comprising SEQ ID NO: 153 and a heavy chain variable region comprising SEQ ID NO: 310; a light chain variable region comprising SEQ ID NO: 154 and a heavy chain variable region comprising SEQ ID NO: 311; a light chain variable region comprising SEQ ID NO: 155 and a heavy chain variable region comprising SEQ ID NO: 312; a light chain variable region comprising SEQ ID NO: 156 and a heavy chain variable region comprising SEQ ID NO: 313; and a light chain variable region comprising SEQ ID NO: 157 and a heavy chain variable region comprising SEQ ID NO: 314, wherein the antibody or functional fragment thereof comprises a cysteine or non-canonical amino acid amino acid substitution at one or more conjugation site(s) selected from the group consisting of D70 of the antibody light chain relative to reference sequence SEQ ID NO: 455, E276 of the antibody heavy chain relative to reference sequence SEQ ID NO: 612, and T363 of the antibody heavy chain relative to reference sequence SEQ ID NO: 612.

[0195] In one embodiment the antibody or fragment thereof comprises a light chain variable region encoded by a polynucleotide sequence selected from the group consisting of SEQ ID NOs: 1571-1727 and a heavy chain variable region encoded by a polynucleotide sequence selected from the group consisting of SEQ ID NOs: 1728-1884, wherein the antibody or functional fragment thereof comprises a cysteine or non-canonical amino acid amino acid substitution at one or more conjugation site(s) selected from the group consisting of D70 of the antibody light chain relative to reference sequence SEQ ID NO: 455, E276 of the antibody heavy chain relative to reference sequence SEQ ID NO: 612, and T363 of the antibody heavy chain relative to reference sequence SEQ ID NO: 612.

[0196] In one embodiment the antibody or fragment thereof comprises a combination of light chain variable region and a heavy chain variable region selected from the group consisting of a light chain variable region encoded by a polynucleotide sequence comprising SEQ ID NO: 1571 and a heavy chain variable region encoded by a polynucleotide sequence comprising SEQ ID NO: 1728; a light chain variable region encoded by a polynucleotide sequence comprising SEQ ID NO: 1572 and a heavy chain variable region encoded by a polynucleotide sequence comprising SEQ ID NO: 1729; a light chain variable region encoded by a polynucleotide sequence comprising SEQ ID NO: 1573 and a heavy chain variable region encoded by a polynucleotide sequence comprising SEQ ID NO: 1730; a light chain variable region encoded by a polynucleotide sequence comprising SEQ ID NO: 1574 and a heavy chain variable region encoded by a polynucleotide sequence comprising SEQ ID NO: 1731; a light chain variable region encoded by a polynucleotide sequence comprising SEQ ID NO: 1575 and a heavy chain variable region encoded by a polynucleotide sequence comprising SEQ ID NO: 1732; a light chain variable region encoded by a polynucleotide sequence comprising SEQ ID NO: 1576 and a heavy chain variable region encoded by a polynucleotide sequence comprising SEQ ID NO: 1733; a light chain variable region encoded by a polynucleotide sequence comprising SEQ ID NO: 1577 and a heavy chain variable region encoded by a polynucleotide sequence comprising SEQ ID NO: 1734; a light chain variable region encoded by a polynucleotide sequence comprising SEQ ID NO: 1578 and a heavy chain variable region encoded by a polynucleotide sequence comprising SEQ ID NO: 1735; a light chain variable region encoded by a polynucleotide sequence comprising SEQ ID NO: 1579 and a heavy chain variable region encoded by a polynucleotide sequence comprising SEQ ID NO: 1736; a light chain variable region encoded by a polynucleotide sequence comprising SEQ ID NO: 1580 and a heavy chain variable region encoded by a polynucleotide sequence comprising SEQ ID NO: 1737; a light chain variable region encoded by a polynucleotide sequence comprising SEQ ID NO: 1581 and a heavy chain variable region encoded by a polynucleotide sequence comprising SEQ ID NO: 1738; a light chain variable region encoded by a polynucleotide sequence comprising SEQ ID NO: 1582 and a heavy chain variable region encoded by a polynucleotide sequence comprising SEQ ID NO: 1739; a light chain variable region encoded by a polynucleotide sequence comprising SEQ ID NO: 1583 and a heavy chain variable region encoded by a polynucleotide sequence comprising SEQ ID NO: 1740; a light chain variable region encoded by a polynucleotide sequence comprising SEQ ID NO: 1584 and a heavy chain variable region encoded by a polynucleotide sequence comprising SEQ ID NO: 1741; a light chain variable region encoded by a polynucleotide sequence comprising SEQ ID NO: 1585 and a heavy chain variable region encoded by a polynucleotide sequence comprising SEQ ID NO: 1742; a light chain variable region encoded by a polynucleotide sequence comprising SEQ ID NO: 1586 and a heavy chain variable region encoded by a polynucleotide sequence comprising SEQ ID NO: 1743; a light chain variable region encoded by a polynucleotide sequence comprising SEQ ID NO: 1587 and a heavy chain variable region encoded by a polynucleotide sequence comprising SEQ ID NO: 1744; a light chain variable region encoded by a polynucleotide sequence comprising SEQ ID NO: 1588 and a heavy chain variable region encoded by a polynucleotide sequence comprising SEQ ID NO: 1745; a light chain variable region encoded by a polynucleotide sequence comprising SEQ ID NO: 1589 and a heavy chain variable region encoded by a polynucleotide sequence comprising SEQ ID NO: 1746; a light chain variable region encoded by a polynucleotide sequence comprising SEQ ID NO: 1590 and a heavy chain variable region encoded by a polynucleotide sequence comprising SEQ ID NO: 1747; a light chain variable region encoded by a polynucleotide sequence comprising SEQ ID NO: 1591 and a heavy chain variable region encoded by a polynucleotide sequence comprising SEQ ID NO: 1748; a light chain variable region encoded by a polynucleotide sequence comprising SEQ ID NO: 1592 and a heavy chain variable region encoded by a polynucleotide sequence comprising SEQ ID NO: 1749; a light chain variable region encoded by a polynucleotide sequence comprising SEQ ID NO: 1593 and a heavy chain variable region encoded by a polynucleotide sequence comprising SEQ ID NO: 1750; a light chain variable region encoded by a polynucleotide sequence comprising SEQ ID NO: 1594 and a heavy chain variable region encoded by a polynucleotide sequence comprising SEQ ID NO: 1751; a light chain variable region encoded by a polynucleotide sequence comprising SEQ ID NO: 1595 and a heavy chain variable region encoded by a polynucleotide sequence comprising SEQ ID NO: 1752; a light chain variable region encoded by a polynucleotide sequence comprising SEQ ID NO: 1596 and a heavy chain variable region encoded by a polynucleotide sequence comprising SEQ ID NO: 1753; a light chain variable region encoded by a polynucleotide sequence comprising SEQ ID NO: 1597 and a heavy chain variable region encoded by a polynucleotide sequence comprising SEQ ID NO: 1754; a light chain variable region encoded by a polynucleotide sequence comprising SEQ ID NO: 1598 and a heavy chain variable region encoded by a polynucleotide sequence comprising SEQ ID NO: 1755; a light chain variable region encoded by a polynucleotide sequence comprising SEQ ID NO: 1599 and a heavy chain variable region encoded by a polynucleotide sequence comprising SEQ ID NO: 1756; a light chain variable region encoded by a polynucleotide sequence comprising SEQ ID NO: 1600 and a heavy chain variable region encoded by a polynucleotide sequence comprising SEQ ID NO: 1757; a light chain variable region encoded by a polynucleotide sequence comprising SEQ ID NO: 1601 and a heavy chain variable region encoded by a polynucleotide sequence comprising SEQ ID NO: 1758; a light chain variable region encoded by a polynucleotide sequence comprising SEQ ID NO: 1602 and a heavy chain variable region encoded by a polynucleotide sequence comprising SEQ ID NO: 1759; a light chain variable region encoded by a polynucleotide sequence comprising SEQ ID NO: 1603 and a heavy chain variable region encoded by a polynucleotide sequence comprising SEQ ID NO: 1760; a light chain variable region encoded by a polynucleotide sequence comprising SEQ ID NO: 1604 and a heavy chain variable region encoded by a polynucleotide sequence comprising SEQ ID NO: 1761; a light chain variable region encoded by a polynucleotide sequence comprising SEQ ID NO: 1605 and a heavy chain variable region encoded by a polynucleotide sequence comprising SEQ ID NO: 1762; a light chain variable region encoded by a polynucleotide sequence comprising SEQ ID NO: 1606 and a heavy chain variable region encoded by a polynucleotide sequence comprising SEQ ID NO: 1763; a light chain variable region encoded by a polynucleotide sequence comprising SEQ ID NO: 1607 and a heavy chain variable region encoded by a polynucleotide sequence comprising SEQ ID NO: 1764; a light chain variable region encoded by a polynucleotide sequence comprising SEQ ID NO: 1608 and a heavy chain variable region encoded by a polynucleotide sequence comprising SEQ ID NO: 1765; a light chain variable region encoded by a polynucleotide sequence comprising SEQ ID NO: 1609 and a heavy chain variable region encoded by a polynucleotide sequence comprising SEQ ID NO: 1766; a light chain variable region encoded by a polynucleotide sequence comprising SEQ ID NO: 1610 and a heavy chain variable region encoded by a polynucleotide sequence comprising SEQ ID NO: 1767; a light chain variable region encoded by a polynucleotide sequence comprising SEQ ID NO: 1611 and a heavy chain variable region encoded by a polynucleotide sequence comprising SEQ ID NO: 1768; a light chain variable region encoded by a polynucleotide sequence comprising SEQ ID NO: 1612 and a heavy chain variable region encoded by a polynucleotide sequence comprising SEQ ID NO: 1769; a light chain variable region encoded by a polynucleotide sequence comprising SEQ ID NO: 1613 and a heavy chain variable region encoded by a polynucleotide sequence comprising SEQ ID NO: 1770; a light chain variable region encoded by a polynucleotide sequence comprising SEQ ID NO: 1614 and a heavy chain variable region encoded by a polynucleotide sequence comprising SEQ ID NO: 1771; a light chain variable region encoded by a polynucleotide sequence comprising SEQ ID NO: 1615 and a heavy chain variable region encoded by a polynucleotide sequence comprising SEQ ID NO: 1772; a light chain variable region encoded by a polynucleotide sequence comprising SEQ ID NO: 1616 and a heavy chain variable region encoded by a polynucleotide sequence comprising SEQ ID NO: 1773; a light chain variable region encoded by a polynucleotide sequence comprising SEQ ID NO: 1617 and a heavy chain variable region encoded by a polynucleotide sequence comprising SEQ ID NO: 1774; a light chain variable region encoded by a polynucleotide sequence comprising SEQ ID NO: 1618 and a heavy chain variable region encoded by a polynucleotide sequence comprising SEQ ID NO: 1775; a light chain variable region encoded by a polynucleotide sequence comprising SEQ ID NO: 1619 and a heavy chain variable region encoded by a polynucleotide sequence comprising SEQ ID NO: 1776; a light chain variable region encoded by a polynucleotide sequence comprising SEQ ID NO: 1620 and a heavy chain variable region encoded by a polynucleotide sequence comprising SEQ ID NO: 1777; a light chain variable region encoded by a polynucleotide sequence comprising SEQ ID NO: 1621 and a heavy chain variable region encoded by a polynucleotide sequence comprising SEQ ID NO: 1778; a light chain variable region encoded by a polynucleotide sequence comprising SEQ ID NO: 1622 and a heavy chain variable region encoded by a polynucleotide sequence comprising SEQ ID NO: 1779; a light chain variable region encoded by a polynucleotide sequence comprising SEQ ID NO: 1623 and a heavy chain variable region encoded by a polynucleotide sequence comprising SEQ ID NO: 1780; a light chain variable region encoded by a polynucleotide sequence comprising SEQ ID NO: 1624 and a heavy chain variable region encoded by a polynucleotide sequence comprising SEQ ID NO: 1781; a light chain variable region encoded by a polynucleotide sequence comprising SEQ ID NO: 1625 and a heavy chain variable region encoded by a polynucleotide sequence comprising SEQ ID NO: 1782; a light chain variable region encoded by a polynucleotide sequence comprising SEQ ID NO: 1626 and a heavy chain variable region encoded by a polynucleotide sequence comprising SEQ ID NO: 1783; a light chain variable region encoded by a polynucleotide sequence comprising SEQ ID NO: 1627 and a heavy chain variable region encoded by a polynucleotide sequence comprising SEQ ID NO: 1784; a light chain variable region encoded by a polynucleotide sequence comprising SEQ ID NO: 1628 and a heavy chain variable region encoded by a polynucleotide sequence comprising SEQ ID NO: 1785; a light chain variable region encoded by a polynucleotide sequence comprising SEQ ID NO: 1629 and a heavy chain variable region encoded by a polynucleotide sequence comprising SEQ ID NO: 1786; a light chain variable region encoded by a polynucleotide sequence comprising SEQ ID NO: 1630 and a heavy chain variable region encoded by a polynucleotide sequence comprising SEQ ID NO: 1787; a light chain variable region encoded by a polynucleotide sequence comprising SEQ ID NO: 1631 and a heavy chain variable region encoded by a polynucleotide sequence comprising SEQ ID NO: 1788; a light chain variable region encoded by a polynucleotide sequence comprising SEQ ID NO: 1632 and a heavy chain variable region encoded by a polynucleotide sequence comprising SEQ ID NO: 1789; a light chain variable region encoded by a polynucleotide sequence comprising SEQ ID NO: 1633 and a heavy chain variable region encoded by a polynucleotide sequence comprising SEQ ID NO: 1790; a light chain variable region encoded by a polynucleotide sequence comprising SEQ ID NO: 1634 and a heavy chain variable region encoded by a polynucleotide sequence comprising SEQ ID NO: 1791; a light chain variable region encoded by a polynucleotide sequence comprising SEQ ID NO: 1635 and a heavy chain variable region encoded by a polynucleotide sequence comprising SEQ ID NO: 1792; a light chain variable region encoded by a polynucleotide sequence comprising SEQ ID NO: 1636 and a heavy chain variable region encoded by a polynucleotide sequence comprising SEQ ID NO: 1793; a light chain variable region encoded by a polynucleotide sequence comprising SEQ ID NO: 1637 and a heavy chain variable region encoded by a polynucleotide sequence comprising SEQ ID NO: 1794; a light chain variable region encoded by a polynucleotide sequence comprising SEQ ID NO: 1638 and a heavy chain variable region encoded by a polynucleotide sequence comprising SEQ ID NO: 1795; a light chain variable region encoded by a polynucleotide sequence comprising SEQ ID NO: 1639 and a heavy chain variable region encoded by a polynucleotide sequence comprising SEQ ID NO: 1796; a light chain variable region encoded by a polynucleotide sequence comprising SEQ ID NO: 1640 and a heavy chain variable region encoded by a polynucleotide sequence comprising SEQ ID NO: 1797; a light chain variable region encoded by a polynucleotide sequence comprising SEQ ID NO: 1641 and a heavy chain variable region encoded by a polynucleotide sequence comprising SEQ ID NO: 1798; a light chain variable region encoded by a polynucleotide sequence comprising SEQ ID NO: 1642 and a heavy chain variable region encoded by a polynucleotide sequence comprising SEQ ID NO: 1799; a light chain variable region encoded by a polynucleotide sequence comprising SEQ ID NO: 1643 and a heavy chain variable region encoded by a polynucleotide sequence comprising SEQ ID NO: 1800; a light chain variable region encoded by a polynucleotide sequence comprising SEQ ID NO: 1644 and a heavy chain variable region encoded by a polynucleotide sequence comprising SEQ ID NO: 1801; a light chain variable region encoded by a polynucleotide sequence comprising SEQ ID NO: 1645 and a heavy chain variable region encoded by a polynucleotide sequence comprising SEQ ID NO: 1802; a light chain variable region encoded by a polynucleotide sequence comprising SEQ ID NO: 1646 and a heavy chain variable region encoded by a polynucleotide sequence comprising SEQ ID NO: 1803; a light chain variable region encoded by a polynucleotide sequence comprising SEQ ID NO: 1647 and a heavy chain variable region encoded by a polynucleotide sequence comprising SEQ ID NO: 1804; a light chain variable region encoded by a polynucleotide sequence comprising SEQ ID NO: 1648 and a heavy chain variable region encoded by a polynucleotide sequence comprising SEQ ID NO: 1805; a light chain variable region encoded by a polynucleotide sequence comprising SEQ ID NO: 1649 and a heavy chain variable region encoded by a polynucleotide sequence comprising SEQ ID NO: 1806; a light chain variable region encoded by a polynucleotide sequence comprising SEQ ID NO: 1650 and a heavy chain variable region encoded by a polynucleotide sequence comprising SEQ ID NO: 1807; a light chain variable region encoded by a polynucleotide sequence comprising SEQ ID NO: 1651 and a heavy chain variable region encoded by a polynucleotide sequence comprising SEQ ID NO: 1808; a light chain variable region encoded by a polynucleotide sequence comprising SEQ ID NO: 1652 and a heavy chain variable region encoded by a polynucleotide sequence comprising SEQ ID NO: 1809; a light chain variable region encoded by a polynucleotide sequence comprising SEQ ID NO: 1653 and a heavy chain variable region encoded by a polynucleotide sequence comprising SEQ ID NO: 1810; a light chain variable region encoded by a polynucleotide sequence comprising SEQ ID NO: 1654 and a heavy chain variable region encoded by a polynucleotide sequence comprising SEQ ID NO: 1811; a light chain variable region encoded by a polynucleotide sequence comprising SEQ ID NO: 1655 and a heavy chain variable region encoded by a polynucleotide sequence comprising SEQ ID NO: 1812; a light chain variable region encoded by a polynucleotide sequence comprising SEQ ID NO: 1656 and a heavy chain variable region encoded by a polynucleotide sequence comprising SEQ ID NO: 1813; a light chain variable region encoded by a polynucleotide sequence comprising SEQ ID NO: 1657 and a heavy chain variable region encoded by a polynucleotide sequence comprising SEQ ID NO: 1814; a light chain variable region encoded by a polynucleotide sequence comprising SEQ ID NO: 1658 and a heavy chain variable region encoded by a polynucleotide sequence comprising SEQ ID NO: 1815; a light chain variable region encoded by a polynucleotide sequence comprising SEQ ID NO: 1659 and a heavy chain variable region encoded by a polynucleotide sequence comprising SEQ ID NO: 1816; a light chain variable region encoded by a polynucleotide sequence comprising SEQ ID NO: 1660 and a heavy chain variable region encoded by a polynucleotide sequence comprising SEQ ID NO: 1817; a light chain variable region encoded by a polynucleotide sequence comprising SEQ ID NO: 1661 and a heavy chain variable region encoded by a polynucleotide sequence comprising SEQ ID NO: 1818; a light chain variable region encoded by a polynucleotide sequence comprising SEQ ID NO: 1662 and a heavy chain variable region encoded by a polynucleotide sequence comprising SEQ ID NO: 1819; a light chain variable region encoded by a polynucleotide sequence comprising SEQ ID NO: 1663 and a heavy chain variable region encoded by a polynucleotide sequence comprising SEQ ID NO: 1820; a light chain variable region encoded by a polynucleotide sequence comprising SEQ ID NO: 1664 and a heavy chain variable region encoded by a polynucleotide sequence comprising SEQ ID NO: 1821; a light chain variable region encoded by a polynucleotide sequence comprising SEQ ID NO: 1665 and a heavy chain variable region encoded by a polynucleotide sequence comprising SEQ ID NO: 1822; a light chain variable region encoded by a polynucleotide sequence comprising SEQ ID NO: 1666 and a heavy chain variable region encoded by a polynucleotide sequence comprising SEQ ID NO: 1823; a light chain variable region encoded by a polynucleotide sequence comprising SEQ ID NO: 1667 and a heavy chain variable region encoded by a polynucleotide sequence comprising SEQ ID NO: 1824; a light chain variable region encoded by a polynucleotide sequence comprising SEQ ID NO: 1668 and a heavy chain variable region encoded by a polynucleotide sequence comprising SEQ ID NO: 1825; a light chain variable region encoded by a polynucleotide sequence comprising SEQ ID NO: 1669 and a heavy chain variable region encoded by a polynucleotide sequence comprising SEQ ID NO: 1826; a light chain variable region encoded by a polynucleotide sequence comprising SEQ ID NO: 1670 and a heavy chain variable region encoded by a polynucleotide sequence comprising SEQ ID NO: 1827; a light chain variable region encoded by a polynucleotide sequence comprising SEQ ID NO: 1671 and a heavy chain variable region encoded by a polynucleotide sequence comprising SEQ ID NO: 1828; a light chain variable region encoded by a polynucleotide sequence comprising SEQ ID NO: 1672 and a heavy chain variable region encoded by a polynucleotide sequence comprising SEQ ID NO: 1829; a light chain variable region encoded by a polynucleotide sequence comprising SEQ ID NO: 1673 and a heavy chain variable region encoded by a polynucleotide sequence comprising SEQ ID NO: 1830; a light chain variable region encoded by a polynucleotide sequence comprising SEQ ID NO: 1674 and a heavy chain variable region encoded by a polynucleotide sequence comprising SEQ ID NO: 1831; a light chain variable region encoded by a polynucleotide sequence comprising SEQ ID NO: 1675 and a heavy chain variable region encoded by a polynucleotide sequence comprising SEQ ID NO: 1832; a light chain variable region encoded by a polynucleotide sequence comprising SEQ ID NO: 1676 and a heavy chain variable region encoded by a polynucleotide sequence comprising SEQ ID NO: 1833; a light chain variable region encoded by a polynucleotide sequence comprising SEQ ID NO: 1677 and a heavy chain variable region encoded by a polynucleotide sequence comprising SEQ ID NO: 1834; a light chain variable region encoded by a polynucleotide sequence comprising SEQ ID NO: 1678 and a heavy chain variable region encoded by a polynucleotide sequence comprising SEQ ID NO: 1835; a light chain variable region encoded by a polynucleotide sequence comprising SEQ ID NO: 1679 and a heavy chain variable region encoded by a polynucleotide sequence comprising SEQ ID NO: 1836; a light chain variable region encoded by a polynucleotide sequence comprising SEQ ID NO: 1680 and a heavy chain variable region encoded by a polynucleotide sequence comprising SEQ ID NO: 1837; a light chain variable region encoded by a polynucleotide sequence comprising SEQ ID NO: 1681 and a heavy chain variable region encoded by a polynucleotide sequence comprising SEQ ID NO: 1838; a light chain variable region encoded by a polynucleotide sequence comprising SEQ ID NO: 1682 and a heavy chain variable region encoded by a polynucleotide sequence comprising SEQ ID NO: 1839; a light chain variable region encoded by a polynucleotide sequence comprising SEQ ID NO: 1683 and a heavy chain variable region encoded by a polynucleotide sequence comprising SEQ ID NO: 1840; a light chain variable region encoded by a polynucleotide sequence comprising SEQ ID NO: 1684 and a heavy chain variable region encoded by a polynucleotide sequence comprising SEQ ID NO: 1841; a light chain variable region encoded by a polynucleotide sequence comprising SEQ ID NO: 1685 and a heavy chain variable region encoded by a polynucleotide sequence comprising SEQ ID NO: 1842; a light chain variable region encoded by a polynucleotide sequence comprising SEQ ID NO: 1686 and a heavy chain variable region encoded by a polynucleotide sequence comprising SEQ ID NO: 1843; a light chain variable region encoded by a polynucleotide sequence comprising SEQ ID NO: 1687 and a heavy chain variable region encoded by a polynucleotide sequence comprising SEQ ID NO: 1844; a light chain variable region encoded by a polynucleotide sequence comprising SEQ ID NO: 1688 and a heavy chain variable region encoded by a polynucleotide sequence comprising SEQ ID NO: 1845; a light chain variable region encoded by a polynucleotide sequence comprising SEQ ID NO: 1689 and a heavy chain variable region encoded by a polynucleotide sequence comprising SEQ ID NO: 1846; a light chain variable region encoded by a polynucleotide sequence comprising SEQ ID NO: 1690 and a heavy chain variable region encoded by a polynucleotide sequence comprising SEQ ID NO: 1847; a light chain variable region encoded by a polynucleotide sequence comprising SEQ ID NO: 1691 and a heavy chain variable region encoded by a polynucleotide sequence comprising SEQ ID NO: 1848; a light chain variable region encoded by a polynucleotide sequence comprising SEQ ID NO: 1692 and a heavy chain variable region encoded by a polynucleotide sequence comprising SEQ ID NO: 1849; a light chain variable region encoded by a polynucleotide sequence comprising SEQ ID NO: 1693 and a heavy chain variable region encoded by a polynucleotide sequence comprising SEQ ID NO: 1850; a light chain variable region encoded by a polynucleotide sequence comprising SEQ ID NO: 1694 and a heavy chain variable region encoded by a polynucleotide sequence comprising SEQ ID NO: 1851; a light chain variable region encoded by a polynucleotide sequence comprising SEQ ID NO: 1695 and a heavy chain variable region encoded by a polynucleotide sequence comprising SEQ ID NO: 1852; a light chain variable region encoded by a polynucleotide sequence comprising SEQ ID NO: 1696 and a heavy chain variable region encoded by a polynucleotide sequence comprising SEQ ID NO: 1853; a light chain variable region encoded by a polynucleotide sequence comprising SEQ ID NO: 1697 and a heavy chain variable region encoded by a polynucleotide sequence comprising SEQ ID NO: 1854; a light chain variable region encoded by a polynucleotide sequence comprising SEQ ID NO: 1698 and a heavy chain variable region encoded by a polynucleotide sequence comprising SEQ ID NO: 1855; a light chain variable region encoded by a polynucleotide sequence comprising SEQ ID NO: 1699 and a heavy chain variable region encoded by a polynucleotide sequence comprising SEQ ID NO: 1856; a light chain variable region encoded by a polynucleotide sequence comprising SEQ ID NO: 1700 and a heavy chain variable region encoded by a polynucleotide sequence comprising SEQ ID NO: 1857; a light chain variable region encoded by a polynucleotide sequence comprising SEQ ID NO: 1701 and a heavy chain variable region encoded by a polynucleotide sequence comprising SEQ ID NO: 1858; a light chain variable region encoded by a polynucleotide sequence comprising SEQ ID NO: 1702 and a heavy chain variable region encoded by a polynucleotide sequence comprising SEQ ID NO: 1859; a light chain variable region encoded by a polynucleotide sequence comprising SEQ ID NO: 1703 and a heavy chain variable region encoded by a polynucleotide sequence comprising SEQ ID NO: 1860; a light chain variable region encoded by a polynucleotide sequence comprising SEQ ID NO: 1704 and a heavy chain variable region encoded by a polynucleotide sequence comprising SEQ ID NO: 1861; a light chain variable region encoded by a polynucleotide sequence comprising SEQ ID NO: 1705 and a heavy chain variable region encoded by a polynucleotide sequence comprising SEQ ID NO: 1862; a light chain variable region encoded by a polynucleotide sequence comprising SEQ ID NO: 1706 and a heavy chain variable region encoded by a polynucleotide sequence comprising SEQ ID NO: 1863; a light chain variable region encoded by a polynucleotide sequence comprising SEQ ID NO: 1707 and a heavy chain variable region encoded by a polynucleotide sequence comprising SEQ ID NO: 1864; a light chain variable region encoded by a polynucleotide sequence comprising SEQ ID NO: 1708 and a heavy chain variable region encoded by a polynucleotide sequence comprising SEQ ID NO: 1865; a light chain variable region encoded by a polynucleotide sequence comprising SEQ ID NO: 1709 and a heavy chain variable region encoded by a polynucleotide sequence comprising SEQ ID NO: 1866; a light chain variable region encoded by a polynucleotide sequence comprising SEQ ID NO: 1710 and a heavy chain variable region encoded by a polynucleotide sequence comprising SEQ ID NO: 1867; a light chain variable region encoded by a polynucleotide sequence comprising SEQ ID NO: 1711 and a heavy chain variable region encoded by a polynucleotide sequence comprising SEQ ID NO: 1868; a light chain variable region encoded by a polynucleotide sequence comprising SEQ ID NO: 1712 and a heavy chain variable region encoded by a polynucleotide sequence comprising SEQ ID NO: 1869; a light chain variable region encoded by a polynucleotide sequence comprising SEQ ID NO: 1713 and a heavy chain variable region encoded by a polynucleotide sequence comprising SEQ ID NO: 1870; a light chain variable region encoded by a polynucleotide sequence comprising SEQ ID NO: 1714 and a heavy chain variable region encoded by a polynucleotide sequence comprising SEQ ID NO: 1871; a light chain variable region encoded by a polynucleotide sequence comprising SEQ ID NO: 1715 and a heavy chain variable region encoded by a polynucleotide sequence comprising SEQ ID NO: 1872; a light chain variable region encoded by a polynucleotide sequence comprising SEQ ID NO: 1716 and a heavy chain variable region encoded by a polynucleotide sequence comprising SEQ ID NO: 1873; a light chain variable region encoded by a polynucleotide sequence comprising SEQ ID NO: 1717 and a heavy chain variable region encoded by a polynucleotide sequence comprising SEQ ID NO: 1874; a light chain variable region encoded by a polynucleotide sequence comprising SEQ ID NO: 1718 and a heavy chain variable region encoded by a polynucleotide sequence comprising SEQ ID NO: 1875; a light chain variable region encoded by a polynucleotide sequence comprising SEQ ID NO: 1719 and a heavy chain variable region encoded by a polynucleotide sequence comprising SEQ ID NO: 1876; a light chain variable region encoded by a polynucleotide sequence comprising SEQ ID NO: 1720 and a heavy chain variable region encoded by a polynucleotide sequence comprising SEQ ID NO: 1877; a light chain variable region encoded by a polynucleotide sequence comprising SEQ ID NO: 1721 and a heavy chain variable region encoded by a polynucleotide sequence comprising SEQ ID NO: 1878; a light chain variable region encoded by a polynucleotide sequence comprising SEQ ID NO: 1722 and a heavy chain variable region encoded by a polynucleotide sequence comprising SEQ ID NO: 1879; a light chain variable region encoded by a polynucleotide sequence comprising SEQ ID NO: 1723 and a heavy chain variable region encoded by a polynucleotide sequence comprising SEQ ID NO: 1880; a light chain variable region encoded by a polynucleotide sequence comprising SEQ ID NO: 1724 and a heavy chain variable region encoded by a polynucleotide sequence comprising SEQ ID NO: 1881; a light chain variable region encoded by a polynucleotide sequence comprising SEQ ID NO: 1725 and a heavy chain variable region encoded by a polynucleotide sequence comprising SEQ ID NO: 1882; a light chain variable region encoded by a polynucleotide sequence comprising SEQ ID NO: 1726 and a heavy chain variable region encoded by a polynucleotide sequence comprising SEQ ID NO: 1883; and a light chain variable region encoded by a polynucleotide sequence comprising SEQ ID NO: 1727 and a heavy chain variable region encoded by a polynucleotide sequence comprising SEQ ID NO: 1884, wherein the antibody or functional fragment thereof comprises a cysteine or non-canonical amino acid amino acid substitution at one or more conjugation site(s) selected from the group consisting of D70 of the antibody light chain relative to reference sequence SEQ ID NO: 455, E276 of the antibody heavy chain relative to reference sequence SEQ ID NO: 612, and T363 of the antibody heavy chain relative to reference sequence SEQ ID NO: 612.

[0197] The present invention relates to a composition comprising an anti-GIPR antigen binding protein having at least one conjugation site. The conjugation site must be amenable to conjugation of an additional functional moiety (e.g., a GLP-1 receptor agonist) by a defined conjugation chemistry through the side chain of an amino acid residue at the conjugation site. Achieving highly selective, site-specific conjugation to the anti-GIPR antigen binding protein, in accordance with the present invention, requires consideration of a diverse variety of design criteria. First, a preferred conjugation or coupling chemistry must be defined or predetermined. Functional moieties such as, GLP-1 receptor agonists, can be conjugated or coupled to the selected conjugation site of the anti-GIPR antigen binding protein through an assortment of different conjugation chemistries known in the art. For example, a maleimide-activated conjugation partner targeting an accessible cysteine thiol on the anti-GIPR antigen binding protein is one embodiment, but numerous conjugation or coupling chemistries targeting the side chains of either canonical or non-canonical, e.g., unnatural amino acids in the anti-GIPR antigen binding protein sequence, can be employed in accordance with the present invention.

[0198] Chemistries for the chemoselective conjugation include: copper(I)-catalyzed azide-alkyne [3+2] dipolar cycloadditions, Staudinger ligation, other acyl transfers processes (S→N; X+N), oximations, hydrazone bonding formation and other suitable organic chemistry reactions such as cross-couplings using water-soluble palladium catalysts. (E.g., Bong et al., Chemoselective Pd(0)-catalyzed peptide coupling in water, Organic Letters 3(16):2509-11 (2001); Dibowski et al., Bioconjugation of peptides by palladium-catalyzed C-C cross-coupling in water, Angew. Chem. Int. Ed. 37(4):476-78 (1998); DeVasher et al., Aqueous-phase, palladium-catalyzed cross-coupling of aryl bromides under mild conditions, using water-soluble, sterically demanding alkylphosphines, J. Org. Chem. 69:7919-27 (2004); Shaugnessy et al., J. Org. Chem, 2003, 68, 6767-6774; Prescher, J A and Bertozzi C R, Chemistry in living system, Nature Chemical Biology 1(1); 13-21 (2005)).

[0199] As mentioned above, the conjugation (or covalent binding) to the anti-GIPR antigen binding protein is through the side chain of an amino acid residue at the conjugation site, for example, but not limited to, a cysteinyl residue. The amino acid residue, for example, a cysteinyl residue, at the internal conjugation site that is selected can be one that occupies the same amino acid residue position in a native Fc domain sequence, or the amino acid residue can be engineered into the Fc domain sequence by substitution or insertion.

[0200] Other examples of unnatural amino acid residues that can be particularly useful as the conjugation site in some embodiments of the inventive processes and compositions of matter include: azido-containing amino acid residues, e.g., azidohomoalanine, p-azido-phenylalanine; keto-containing amino acid residues, e.g., p-acetyl-phenylalanine; alkyne-containing amino acid residues, e.g., p-ethynylphenylalanine, homopropargylglycine, p-(prop-2-ynyl)-tyrosine; alkene-containing amino acid residues e.g., homoallylglycine; aryl halide-containing amino acid residues e.g. p-iodophenylalanine, p-bromophenylalanine; and 1,2-aminothiol containing amino acid residues.

[0201] The non-canonical amino acid residues can be incorporated by amino acid substitution or insertion. Non-canonical amino acid residues can be incorporated into the peptide by chemical peptide synthesis rather than by synthesis in biological systems, such as recombinantly expressing cells, or alternatively the skilled artisan can employ known techniques of protein engineering that use recombinantly expressing cells. (See, e.g., Link et al., Non-canonical amino acids in protein engineering, Current Opinion in Biotechnology, 14(6):603-609 (2003); Schultz et al., In vivo incorporation of unnatural amino acids, U.S. Pat. No. 7,045,337).

[0202] The selection of the placement of the conjugation site in the overall anti-GIPR antigen binding protein is another important facet of selecting an internal conjugation site in accordance with the present invention. Any of the exposed amino acid residues on the anti-GIPR antigen binding protein can be potentially useful conjugation sites and can be mutated to cysteine or some other reactive amino acid for site-selective coupling, if not already present at the selected conjugation site of the anti-GIPR antigen binding protein sequence. However, this approach does not take into account potential steric constraints that may perturb the activity of the conjugated partner or limit the reactivity of the engineered mutation.

[0203] In one embodiment, the anti-GIPR antigen binding protein is an antibody or functional fragment thereof. In one embodiment, the anti-GIPR antibody or functional fragment thereof comprises a cysteine or non-canonical amino acid amino acid substitution at one or more conjugation site(s). The conjugation site(s) can be essentially on any residue of the antigen binding protein. In certain embodiments the conjugation site is located within the CL, CHI, CH2 or CH3 region of an antibody or functional fragment thereof. In certain embodiments the conjugation site(s) are selected from the group consisting of D70 of the antibody light chain relative to reference sequence SEQ ID NO: 455; E276 of the antibody heavy chain relative to reference sequence SEQ ID NO: 612; and T363 of the antibody heavy chain relative to reference sequence SEQ ID NO: 612. For sake of clarity, “D70 of the antibody light chain relative to reference sequence SEQ ID NO: 455” is the same substitution site as AHo position D88 of the light chain of antibody 5G12.006 and Kabat position D70 of the light chain of antibody 5G12.006; “E276 of the antibody heavy chain relative to reference sequence SEQ ID NO: 612” is the same substitution site as AHo position E384 of the heavy chain of antibody 5G12.006 and Kabat position E285 of the heavy chain of antibody 5G12.006; and “T363 of the antibody heavy chain relative to reference sequence SEQ ID NO: 612” is the same substitution site as AHo position T487 of the heavy chain of antibody 5G12.006 and Kabat position T382 of the heavy chain of antibody 5G12.006.

[0204] Some antigen binding proteins comprise a variable light domain and a variable heavy domain as listed in one of the rows for one of the antibodies listed in TABLE 3. In some instances, the antigen binding protein comprises two identical variable light domains and two identical variable heavy domains from one of the antibodies listed in TABLE 3. Some antigen binding proteins that are provided comprise a variable light domain and a variable heavy domain as listed in one of the rows for one of the antibodies listed in TABLE 3, except that one or both of the domains differs from the sequence specified in the table at only 1, 2, 3, 4, 5, 6, 7, 8, 9, 10, 11, 12, 13, 14 or 15 amino acid residues, wherein each such sequence difference is independently either a single amino acid deletion, insertion or substitution, with the deletions, insertions and/or substitutions resulting in no more than 1, 2, 3, 4, 5, 6, 7, 8, 9, 10, 11, 12, 13, 14 or 15 amino acid changes relative to the variable domain sequences specified in TABLE 3. In one embodiment, the antigen binding protein comprises a variable region sequence from Table 3, but with the N-terminal methionine deleted. Other antigen binding proteins also comprise a variable light domain and a variable heavy domain as listed in one of the rows for one of the antibodies listed in TABLE 3, except that one or both of the domains differs from the sequence specified in the table in that the heavy chain variable domain and/or light chain variable domain comprises or consists of a sequence of amino acids that has at least 70%, 75%, 80%, 85%, 90%, 95%, 96%, 97%, 98%, or 99% sequence identity to the amino acid sequences of the heavy chain variable domain or light chain variable domain sequences as specified in TABLE 3.

[0205] In another aspect, the antigen binding protein consists just of a variable light or variable heavy domain from an antibody listed in TABLE 3. In still another aspect, the antigen binding protein comprises two or more of the same variable heavy domains or two or more of the same variable light domains from those listed in TABLE 3. Such domain antibodies can be fused together or joined via a linker as described in greater detail below. The domain antibodies can also be fused or linked to one or more molecules to extend the half-life (e.g., PEG or albumin).

[0206] Other antigen binding proteins that are provided are variants of antibodies formed by combination of the heavy and light chains shown in TABLE 3 and comprise light and/or heavy chains that each have at least 70%, 75%, 80%, 85%, 90%, 95%, 96%, 97%, 98% or 99% identity to the amino acid sequences of these chains. In some instances, such antibodies include at least one heavy chain and one light chain, whereas in other instances the variant forms contain two identical light chains and two identical heavy chains.

[0207] The various combinations of heavy chain variable regions may be combined with any of the various combinations of light chain variable regions.

[0208] In a further embodiment, the isolated antigen binding protein provided herein is a human antibody comprising a sequence as set forth in TABLE 3 and is of the IgG₁-, IgG₂-IgG₃- or IgG₄-type.

[0209] The antigen binding proteins disclosed herein are polypeptides into which one or more CDRs are grafted, inserted and/or joined. An antigen binding protein can have 1, 2, 3, 4, 5 or 6 CDRs. An antigen binding protein thus can have, for example, one heavy chain CDR1 (“CDRH1”), and/or one heavy chain CDR2 (“CDRH2”), and/or one heavy chain CDR3 (“CDRH3”), and/or one light chain CDR1 (“CDRL1”), and/or one light chain CDR2 (“CDRL2”), and/or one light chain CDR3 (“CDRL3”). Some antigen binding proteins include both a CDRH3 and a CDRL3. Specific light and heavy chain CDRs are identified in TABLEs 4A and 4B, respectively.

[0210] Complementarity determining regions (CDRs) and framework regions (FR) of a given antibody may be identified using the system described by Kabat et al. in Sequences of Proteins of Immunological Interest, 5th Ed., US Dept. of Health and Human Services, PHS, NIH, NIH Publication no. 91-3242, 1991. Certain antibodies that are disclosed herein comprise one or more amino acid sequences that are identical or have substantial sequence identity to the amino acid sequences of one or more of the CDRs presented in TABLES 4A and 4B. These CDRs use the system described by Kabat et al. as noted above.

[0211] The structure and properties of CDRs within a naturally occurring antibody has been described, supra. Briefly, in a traditional antibody, the CDRs are embedded within a framework in the heavy and light chain variable region where they constitute the regions responsible for antigen binding and recognition. A variable region comprises at least three heavy or light chain CDRs, see, supra (Kabat et al., 1991, Sequences of Proteins of Immunological Interest, Public Health Service N.I.H., Bethesda, MD; see also Chothia and Lesk, 1987, J Mol. Biol. 196:901-917; Chothia et al., 1989, Nature 342: 877-883), within a framework region (designated framework regions 1-4, FR1, FR2, FR3, and FR4, by Kabat et al., 1991, supra; see also Chothia and Lesk, 1987, supra). The CDRs provided herein, however, may not only be used to define the antigen binding domain of a traditional antibody structure, but may be embedded in a variety of other polypeptide structures, as described herein.

[0212] In one embodiment the antibody or fragment thereof comprises a CDRL1, a CDRL2, a CDRL3, a CDRH1, a CDRH2, and a CDRH3, wherein the antibody or functional fragment thereof comprises a cysteine or non-canonical amino acid amino acid substitution at one or more conjugation site(s) selected from the group consisting of D70 of the antibody light chain relative to reference sequence SEQ ID NO: 455, E276 of the antibody heavy chain relative to reference sequence SEQ ID NO: 612, and T363 of the antibody heavy chain relative to reference sequence SEQ ID NO: 612. In one embodiment the antibody or fragment thereof comprises a CDRL1, a CDRL2, a CDRL3, a CDRH1, a CDRH2, and a CDRH3, wherein each CDRL1, CDRL2, CDRL3, CDRH1, CDRH2, and CDRH3, respectively, comprises a sequence selected from the group consisting of SEQ ID NO: 629, SEQ ID NO: 786, SEQ ID NO: 943, SEQ ID NO: 1100, SEQ ID NO: 1257, and SEQ ID NO: 1414; SEQ ID NO: 630, SEQ ID NO: 787, SEQ ID NO: 944, SEQ ID NO: 1101, SEQ ID NO: 1258, and SEQ ID NO: 1415; SEQ ID NO: 631, SEQ ID NO: 788, SEQ ID NO: 945, SEQ ID NO: 1102, SEQ ID NO: 1259, and SEQ ID NO: 1416; SEQ ID NO: 632, SEQ ID NO: 789, SEQ ID NO: 946, SEQ ID NO: 1103, SEQ ID NO: 1260, and SEQ ID NO: 1417; SEQ ID NO: 633, SEQ ID NO: 790, SEQ ID NO: 947, SEQ ID NO: 1104, SEQ ID NO: 1261, and SEQ ID NO: 1418; SEQ ID NO: 634, SEQ ID NO: 791, SEQ ID NO: 948, SEQ ID NO: 1105, SEQ ID NO: 1262, and SEQ ID NO: 1419; SEQ ID NO: 635, SEQ ID NO: 792, SEQ ID NO: 949, SEQ ID NO: 1106, SEQ ID NO: 1263, and SEQ ID NO: 1420; SEQ ID NO: 636, SEQ ID NO: 793, SEQ ID NO: 950, SEQ ID NO: 1107, SEQ ID NO: 1264, and SEQ ID NO: 1421; SEQ ID NO: 637, SEQ ID NO: 794, SEQ ID NO: 951, SEQ ID NO: 1108, SEQ ID NO: 1265, and SEQ ID NO: 1422; SEQ ID NO: 638, SEQ ID NO: 795, SEQ ID NO: 952, SEQ ID NO: 1109, SEQ ID NO: 1266, and SEQ ID NO: 1423; SEQ ID NO: 639, SEQ ID NO: 796, SEQ ID NO: 953, SEQ ID NO: 1110, SEQ ID NO: 1267, and SEQ ID NO: 1424; SEQ ID NO: 640, SEQ ID NO: 797, SEQ ID NO: 954, SEQ ID NO: 1111, SEQ ID NO: 1268, and SEQ ID NO: 1425; SEQ ID NO: 641, SEQ ID NO: 798, SEQ ID NO: 955, SEQ ID NO: 1112, SEQ ID NO: 1269, and SEQ ID NO: 1426; SEQ ID NO: 642, SEQ ID NO: 799, SEQ ID NO: 956, SEQ ID NO: 1113, SEQ ID NO: 1270, and SEQ ID NO: 1427; SEQ ID NO: 643, SEQ ID NO: 800, SEQ ID NO: 957, SEQ ID NO: 1114, SEQ ID NO: 1271, and SEQ ID NO: 1428; SEQ ID NO: 644, SEQ ID NO: 801, SEQ ID NO: 958, SEQ ID NO: 1115, SEQ ID NO: 1272, and SEQ ID NO: 1429; SEQ ID NO: 645, SEQ ID NO: 802, SEQ ID NO: 959, SEQ ID NO: 1116, SEQ ID NO: 1273, and SEQ ID NO: 1430; SEQ ID NO: 646, SEQ ID NO: 803, SEQ ID NO: 960, SEQ ID NO: 1117, SEQ ID NO: 1274, and SEQ ID NO: 1431; SEQ ID NO: 647, SEQ ID NO: 804, SEQ ID NO: 961, SEQ ID NO: 1118, SEQ ID NO: 1275, and SEQ ID NO: 1432; SEQ ID NO: 648, SEQ ID NO: 805, SEQ ID NO: 962, SEQ ID NO: 1119, SEQ ID NO: 1276, and SEQ ID NO: 1433; SEQ ID NO: 649, SEQ ID NO: 806, SEQ ID NO: 963, SEQ ID NO: 1120, SEQ ID NO: 1277, and SEQ ID NO: 1434; SEQ ID NO: 650, SEQ ID NO: 807, SEQ ID NO: 964, SEQ ID NO: 1121, SEQ ID NO: 1278, and SEQ ID NO: 1435; SEQ ID NO: 651, SEQ ID NO: 808, SEQ ID NO: 965, SEQ ID NO: 1122, SEQ ID NO: 1279, and SEQ ID NO: 1436; SEQ ID NO: 652, SEQ ID NO: 809, SEQ ID NO: 966, SEQ ID NO: 1123, SEQ ID NO: 1280, and SEQ ID NO: 1437; SEQ ID NO: 653, SEQ ID NO: 810, SEQ ID NO: 967, SEQ ID NO: 1124, SEQ ID NO: 1281, and SEQ ID NO: 1438; SEQ ID NO: 654, SEQ ID NO: 811, SEQ ID NO: 968, SEQ ID NO: 1125, SEQ ID NO: 1282, and SEQ ID NO: 1439; SEQ ID NO: 655, SEQ ID NO: 812, SEQ ID NO: 969, SEQ ID NO: 1126, SEQ ID NO: 1283, and SEQ ID NO: 1440; SEQ ID NO: 656, SEQ ID NO: 813, SEQ ID NO: 970, SEQ ID NO: 1127, SEQ ID NO: 1284, and SEQ ID NO: 1441; SEQ ID NO: 657, SEQ ID NO: 814, SEQ ID NO: 971, SEQ ID NO: 1128, SEQ ID NO: 1285, and SEQ ID NO: 1442; SEQ ID NO: 658, SEQ ID NO: 815, SEQ ID NO: 972, SEQ ID NO: 1129, SEQ ID NO: 1286, and SEQ ID NO: 1443; SEQ ID NO: 659, SEQ ID NO: 816, SEQ ID NO: 973, SEQ ID NO: 1130, SEQ ID NO: 1287, and SEQ ID NO: 1444; SEQ ID NO: 660, SEQ ID NO: 817, SEQ ID NO: 974, SEQ ID NO: 1131, SEQ ID NO: 1288, and SEQ ID NO: 1445; SEQ ID NO: 661, SEQ ID NO: 818, SEQ ID NO: 975, SEQ ID NO: 1132, SEQ ID NO: 1289, and SEQ ID NO: 1446; SEQ ID NO: 662, SEQ ID NO: 819, SEQ ID NO: 976, SEQ ID NO: 1133, SEQ ID NO: 1290, and SEQ ID NO: 1447; SEQ ID NO: 663, SEQ ID NO: 820, SEQ ID NO: 977, SEQ ID NO: 1134, SEQ ID NO: 1291, and SEQ ID NO: 1448; SEQ ID NO: 664, SEQ ID NO: 821, SEQ ID NO: 978, SEQ ID NO: 1135, SEQ ID NO: 1292, and SEQ ID NO: 1449; SEQ ID NO: 665, SEQ ID NO: 822, SEQ ID NO: 979, SEQ ID NO: 1136, SEQ ID NO: 1293, and SEQ ID NO: 1450; SEQ ID NO: 666, SEQ ID NO: 823, SEQ ID NO: 980, SEQ ID NO: 1137, SEQ ID NO: 1294, and SEQ ID NO: 1451; SEQ ID NO: 667, SEQ ID NO: 824, SEQ ID NO: 981, SEQ ID NO: 1138, SEQ ID NO: 1295, and SEQ ID NO: 1452; SEQ ID NO: 668, SEQ ID NO: 825, SEQ ID NO: 982, SEQ ID NO: 1139, SEQ ID NO: 1296, and SEQ ID NO: 1453; SEQ ID NO: 669, SEQ ID NO: 826, SEQ ID NO: 983, SEQ ID NO: 1140, SEQ ID NO: 1297, and SEQ ID NO: 1454; SEQ ID NO: 670, SEQ ID NO: 827, SEQ ID NO: 984, SEQ ID NO: 1141, SEQ ID NO: 1298, and SEQ ID NO: 1455; SEQ ID NO: 671, SEQ ID NO: 828, SEQ ID NO: 985, SEQ ID NO: 1142, SEQ ID NO: 1299, and SEQ ID NO: 1456; SEQ ID NO: 672, SEQ ID NO: 829, SEQ ID NO: 986, SEQ ID NO: 1143, SEQ ID NO: 1300, and SEQ ID NO: 1457; SEQ ID NO: 673, SEQ ID NO: 830, SEQ ID NO: 987, SEQ ID NO: 1144, SEQ ID NO: 1301, and SEQ ID NO: 1458; SEQ ID NO: 674, SEQ ID NO: 831, SEQ ID NO: 988, SEQ ID NO: 1145, SEQ ID NO: 1302, and SEQ ID NO: 1459; SEQ ID NO: 675, SEQ ID NO: 832, SEQ ID NO: 989, SEQ ID NO: 1146, SEQ ID NO: 1303, and SEQ ID NO: 1460; SEQ ID NO: 676, SEQ ID NO: 833, SEQ ID NO: 990, SEQ ID NO: 1147, SEQ ID NO: 1304, and SEQ ID NO: 1461; SEQ ID NO: 677, SEQ ID NO: 834, SEQ ID NO: 991, SEQ ID NO: 1148, SEQ ID NO: 1305, and SEQ ID NO: 1462; SEQ ID NO: 678, SEQ ID NO: 835, SEQ ID NO: 992, SEQ ID NO: 1149, SEQ ID NO: 1306, and SEQ ID NO: 1463; SEQ ID NO: 679, SEQ ID NO: 836, SEQ ID NO: 993, SEQ ID NO: 1150, SEQ ID NO: 1307, and SEQ ID NO: 1464; SEQ ID NO: 680, SEQ ID NO: 837, SEQ ID NO: 994, SEQ ID NO: 1151, SEQ ID NO: 1308, and SEQ ID NO: 1465; SEQ ID NO: 681, SEQ ID NO: 838, SEQ ID NO: 995, SEQ ID NO: 1152, SEQ ID NO: 1309, and SEQ ID NO: 1466; SEQ ID NO: 682, SEQ ID NO: 839, SEQ ID NO: 996, SEQ ID NO: 1153, SEQ ID NO: 1310, and SEQ ID NO: 1467; SEQ ID NO: 683, SEQ ID NO: 840, SEQ ID NO: 997, SEQ ID NO: 1154, SEQ ID NO: 1311, and SEQ ID NO: 1468; SEQ ID NO: 684, SEQ ID NO: 841, SEQ ID NO: 998, SEQ ID NO: 1155, SEQ ID NO: 1312, and SEQ ID NO: 1469; SEQ ID NO: 685, SEQ ID NO: 842, SEQ ID NO: 999, SEQ ID NO: 1156, SEQ ID NO: 1313, and SEQ ID NO: 1470; SEQ ID NO: 686, SEQ ID NO: 843, SEQ ID NO: 1000, SEQ ID NO: 1157, SEQ ID NO: 1314, and SEQ ID NO: 1471; SEQ ID NO: 687, SEQ ID NO: 844, SEQ ID NO: 1001, SEQ ID NO: 1158, SEQ ID NO: 1315, and SEQ ID NO: 1472; SEQ ID NO: 688, SEQ ID NO: 845, SEQ ID NO: 1002, SEQ ID NO: 1159, SEQ ID NO: 1316, and SEQ ID NO: 1473; SEQ ID NO: 689, SEQ ID NO: 846, SEQ ID NO: 1003, SEQ ID NO: 1160, SEQ ID NO: 1317, and SEQ ID NO: 1474; SEQ ID NO: 690, SEQ ID NO: 847, SEQ ID NO: 1004, SEQ ID NO: 1161, SEQ ID NO: 1318, and SEQ ID NO: 1475; SEQ ID NO: 691, SEQ ID NO: 848, SEQ ID NO: 1005, SEQ ID NO: 1162, SEQ ID NO: 1319, and SEQ ID NO: 1476; SEQ ID NO: 692, SEQ ID NO: 849, SEQ ID NO: 1006, SEQ ID NO: 1163, SEQ ID NO: 1320, and SEQ ID NO: 1477; SEQ ID NO: 693, SEQ ID NO: 850, SEQ ID NO: 1007, SEQ ID NO: 1164, SEQ ID NO: 1321, and SEQ ID NO: 1478; SEQ ID NO: 694, SEQ ID NO: 851, SEQ ID NO: 1008, SEQ ID NO: 1165, SEQ ID NO: 1322, and SEQ ID NO: 1479; SEQ ID NO: 695, SEQ ID NO: 852, SEQ ID NO: 1009, SEQ ID NO: 1166, SEQ ID NO: 1323, and SEQ ID NO: 1480; SEQ ID NO: 696, SEQ ID NO: 853, SEQ ID NO: 1010, SEQ ID NO: 1167, SEQ ID NO: 1324, and SEQ ID NO: 1481; SEQ ID NO: 697, SEQ ID NO: 854, SEQ ID NO: 1011, SEQ ID NO: 1168, SEQ ID NO: 1325, and SEQ ID NO: 1482; SEQ ID NO: 698, SEQ ID NO: 855, SEQ ID NO: 1012, SEQ ID NO: 1169, SEQ ID NO: 1326, and SEQ ID NO: 1483; SEQ ID NO: 699, SEQ ID NO: 856, SEQ ID NO: 1013, SEQ ID NO: 1170, SEQ ID NO: 1327, and SEQ ID NO: 1484; SEQ ID NO: 700, SEQ ID NO: 857, SEQ ID NO: 1014, SEQ ID NO: 1171, SEQ ID NO: 1328, and SEQ ID NO: 1485; SEQ ID NO: 701, SEQ ID NO: 858, SEQ ID NO: 1015, SEQ ID NO: 1172, SEQ ID NO: 1329, and SEQ ID NO: 1486; SEQ ID NO: 702, SEQ ID NO: 859, SEQ ID NO: 1016, SEQ ID NO: 1173, SEQ ID NO: 1330, and SEQ ID NO: 1487; SEQ ID NO: 703, SEQ ID NO: 860, SEQ ID NO: 1017, SEQ ID NO: 1174, SEQ ID NO: 1331, and SEQ ID NO: 1488; SEQ ID NO: 704, SEQ ID NO: 861, SEQ ID NO: 1018, SEQ ID NO: 1175, SEQ ID NO: 1332, and SEQ ID NO: 1489; SEQ ID NO: 705, SEQ ID NO: 862, SEQ ID NO: 1019, SEQ ID NO: 1176, SEQ ID NO: 1333, and SEQ ID NO: 1490; SEQ ID NO: 706, SEQ ID NO: 863, SEQ ID NO: 1020, SEQ ID NO: 1177, SEQ ID NO: 1334, and SEQ ID NO: 1491; SEQ ID NO: 707, SEQ ID NO: 864, SEQ ID NO: 1021, SEQ ID NO: 1178, SEQ ID NO: 1335, and SEQ ID NO: 1492; SEQ ID NO: 708, SEQ ID NO: 865, SEQ ID NO: 1022, SEQ ID NO: 1179, SEQ ID NO: 1336, and SEQ ID NO: 1493; SEQ ID NO: 709, SEQ ID NO: 866, SEQ ID NO: 1023, SEQ ID NO: 1180, SEQ ID NO: 1337, and SEQ ID NO: 1494; SEQ ID NO: 710, SEQ ID NO: 867, SEQ ID NO: 1024, SEQ ID NO: 1181, SEQ ID NO: 1338, and SEQ ID NO: 1495; SEQ ID NO: 711, SEQ ID NO: 868, SEQ ID NO: 1025, SEQ ID NO: 1182, SEQ ID NO: 1339, and SEQ ID NO: 1496; SEQ ID NO: 712, SEQ ID NO: 869, SEQ ID NO: 1026, SEQ ID NO: 1183, SEQ ID NO: 1340, and SEQ ID NO: 1497; SEQ ID NO: 713, SEQ ID NO: 870, SEQ ID NO: 1027, SEQ ID NO: 1184, SEQ ID NO: 1341, and SEQ ID NO: 1498; SEQ ID NO: 714, SEQ ID NO: 871, SEQ ID NO: 1028, SEQ ID NO: 1185, SEQ ID NO: 1342, and SEQ ID NO: 1499; SEQ ID NO: 715, SEQ ID NO: 872, SEQ ID NO: 1029, SEQ ID NO: 1186, SEQ ID NO: 1343, and SEQ ID NO: 1500; SEQ ID NO: 716, SEQ ID NO: 873, SEQ ID NO: 1030, SEQ ID NO: 1187, SEQ ID NO: 1344, and SEQ ID NO: 1501; SEQ ID NO: 717, SEQ ID NO: 874, SEQ ID NO: 1031, SEQ ID NO: 1188, SEQ ID NO: 1345, and SEQ ID NO: 1502; SEQ ID NO: 718, SEQ ID NO: 875, SEQ ID NO: 1032, SEQ ID NO: 1189, SEQ ID NO: 1346, and SEQ ID NO: 1503; SEQ ID NO: 719, SEQ ID NO: 876, SEQ ID NO: 1033, SEQ ID NO: 1190, SEQ ID NO: 1347, and SEQ ID NO: 1504; SEQ ID NO: 720, SEQ ID NO: 877, SEQ ID NO: 1034, SEQ ID NO: 1191, SEQ ID NO: 1348, and SEQ ID NO: 1505; SEQ ID NO: 721, SEQ ID NO: 878, SEQ ID NO: 1035, SEQ ID NO: 1192, SEQ ID NO: 1349, and SEQ ID NO: 1506; SEQ ID NO: 722, SEQ ID NO: 879, SEQ ID NO: 1036, SEQ ID NO: 1193, SEQ ID NO: 1350, and SEQ ID NO: 1507; SEQ ID NO: 723, SEQ ID NO: 880, SEQ ID NO: 1037, SEQ ID NO: 1194, SEQ ID NO: 1351, and SEQ ID NO: 1508; SEQ ID NO: 724, SEQ ID NO: 881, SEQ ID NO: 1038, SEQ ID NO: 1195, SEQ ID NO: 1352, and SEQ ID NO: 1509; SEQ ID NO: 725, SEQ ID NO: 882, SEQ ID NO: 1039, SEQ ID NO: 1196, SEQ ID NO: 1353, and SEQ ID NO: 1510; SEQ ID NO: 726, SEQ ID NO: 883, SEQ ID NO: 1040, SEQ ID NO: 1197, SEQ ID NO: 1354, and SEQ ID NO: 1511; SEQ ID NO: 727, SEQ ID NO: 884, SEQ ID NO: 1041, SEQ ID NO: 1198, SEQ ID NO: 1355, and SEQ ID NO: 1512; SEQ ID NO: 728, SEQ ID NO: 885, SEQ ID NO: 1042, SEQ ID NO: 1199, SEQ ID NO: 1356, and SEQ ID NO: 1513; SEQ ID NO: 729, SEQ ID NO: 886, SEQ ID NO: 1043, SEQ ID NO: 1200, SEQ ID NO: 1357, and SEQ ID NO: 1514; SEQ ID NO: 730, SEQ ID NO: 887, SEQ ID NO: 1044, SEQ ID NO: 1201, SEQ ID NO: 1358, and SEQ ID NO: 1515; SEQ ID NO: 731, SEQ ID NO: 888, SEQ ID NO: 1045, SEQ ID NO: 1202, SEQ ID NO: 1359, and SEQ ID NO: 1516; SEQ ID NO: 732, SEQ ID NO: 889, SEQ ID NO: 1046, SEQ ID NO: 1203, SEQ ID NO: 1360, and SEQ ID NO: 1517; SEQ ID NO: 733, SEQ ID NO: 890, SEQ ID NO: 1047, SEQ ID NO: 1204, SEQ ID NO: 1361, and SEQ ID NO: 1518; SEQ ID NO: 734, SEQ ID NO: 891, SEQ ID NO: 1048, SEQ ID NO: 1205, SEQ ID NO: 1362, and SEQ ID NO: 1519; SEQ ID NO: 735, SEQ ID NO: 892, SEQ ID NO: 1049, SEQ ID NO: 1206, SEQ ID NO: 1363, and SEQ ID NO: 1520; SEQ ID NO: 736, SEQ ID NO: 893, SEQ ID NO: 1050, SEQ ID NO: 1207, SEQ ID NO: 1364, and SEQ ID NO: 1521; SEQ ID NO: 737, SEQ ID NO: 894, SEQ ID NO: 1051, SEQ ID NO: 1208, SEQ ID NO: 1365, and SEQ ID NO: 1522; SEQ ID NO: 738, SEQ ID NO: 895, SEQ ID NO: 1052, SEQ ID NO: 1209, SEQ ID NO: 1366, and SEQ ID NO: 1523; SEQ ID NO: 739, SEQ ID NO: 896, SEQ ID NO: 1053, SEQ ID NO: 1210, SEQ ID NO: 1367, and SEQ ID NO: 1524; SEQ ID NO: 740, SEQ ID NO: 897, SEQ ID NO: 1054, SEQ ID NO: 1211, SEQ ID NO: 1368, and SEQ ID NO: 1525; SEQ ID NO: 741, SEQ ID NO: 898, SEQ ID NO: 1055, SEQ ID NO: 1212, SEQ ID NO: 1369, and SEQ ID NO: 1526; SEQ ID NO: 742, SEQ ID NO: 899, SEQ ID NO: 1056, SEQ ID NO: 1213, SEQ ID NO: 1370, and SEQ ID NO: 1527; SEQ ID NO: 743, SEQ ID NO: 900, SEQ ID NO: 1057, SEQ ID NO: 1214, SEQ ID NO: 1371, and SEQ ID NO: 1528; SEQ ID NO: 744, SEQ ID NO: 901, SEQ ID NO: 1058, SEQ ID NO: 1215, SEQ ID NO: 1372, and SEQ ID NO: 1529; SEQ ID NO: 745, SEQ ID NO: 902, SEQ ID NO: 1059, SEQ ID NO: 1216, SEQ ID NO: 1373, and SEQ ID NO: 1530; SEQ ID NO: 746, SEQ ID NO: 903, SEQ ID NO: 1060, SEQ ID NO: 1217, SEQ ID NO: 1374, and SEQ ID NO: 1531; SEQ ID NO: 747, SEQ ID NO: 904, SEQ ID NO: 1061, SEQ ID NO: 1218, SEQ ID NO: 1375, and SEQ ID NO: 1532; SEQ ID NO: 748, SEQ ID NO: 905, SEQ ID NO: 1062, SEQ ID NO: 1219, SEQ ID NO: 1376, and SEQ ID NO: 1533; SEQ ID NO: 749, SEQ ID NO: 906, SEQ ID NO: 1063, SEQ ID NO: 1220, SEQ ID NO: 1377, and SEQ ID NO: 1534; SEQ ID NO: 750, SEQ ID NO: 907, SEQ ID NO: 1064, SEQ ID NO: 1221, SEQ ID NO: 1378, and SEQ ID NO: 1535; SEQ ID NO: 751, SEQ ID NO: 908, SEQ ID NO: 1065, SEQ ID NO: 1222, SEQ ID NO: 1379, and SEQ ID NO: 1536; SEQ ID NO: 752, SEQ ID NO: 909, SEQ ID NO: 1066, SEQ ID NO: 1223, SEQ ID NO: 1380, and SEQ ID NO: 1537; SEQ ID NO: 753, SEQ ID NO: 910, SEQ ID NO: 1067, SEQ ID NO: 1224, SEQ ID NO: 1381, and SEQ ID NO: 1538; SEQ ID NO: 754, SEQ ID NO: 911, SEQ ID NO: 1068, SEQ ID NO: 1225, SEQ ID NO: 1382, and SEQ ID NO: 1539; SEQ ID NO: 755, SEQ ID NO: 912, SEQ ID NO: 1069, SEQ ID NO: 1226, SEQ ID NO: 1383, and SEQ ID NO: 1540; SEQ ID NO: 756, SEQ ID NO: 913, SEQ ID NO: 1070, SEQ ID NO: 1227, SEQ ID NO: 1384, and SEQ ID NO: 1541; SEQ ID NO: 757, SEQ ID NO: 914, SEQ ID NO: 1071, SEQ ID NO: 1228, SEQ ID NO: 1385, and SEQ ID NO: 1542; SEQ ID NO: 758, SEQ ID NO: 915, SEQ ID NO: 1072, SEQ ID NO: 1229, SEQ ID NO: 1386, and SEQ ID NO: 1543; SEQ ID NO: 759, SEQ ID NO: 916, SEQ ID NO: 1073, SEQ ID NO: 1230, SEQ ID NO: 1387, and SEQ ID NO: 1544; SEQ ID NO: 760, SEQ ID NO: 917, SEQ ID NO: 1074, SEQ ID NO: 1231, SEQ ID NO: 1388, and SEQ ID NO: 1545; SEQ ID NO: 761, SEQ ID NO: 918, SEQ ID NO: 1075, SEQ ID NO: 1232, SEQ ID NO: 1389, and SEQ ID NO: 1546; SEQ ID NO: 762, SEQ ID NO: 919, SEQ ID NO: 1076, SEQ ID NO: 1233, SEQ ID NO: 1390, and SEQ ID NO: 1547; SEQ ID NO: 763, SEQ ID NO: 920, SEQ ID NO: 1077, SEQ ID NO: 1234, SEQ ID NO: 1391, and SEQ ID NO: 1548; SEQ ID NO: 764, SEQ ID NO: 921, SEQ ID NO: 1078, SEQ ID NO: 1235, SEQ ID NO: 1392, and SEQ ID NO: 1549; SEQ ID NO: 765, SEQ ID NO: 922, SEQ ID NO: 1079, SEQ ID NO: 1236, SEQ ID NO: 1393, and SEQ ID NO: 1550; SEQ ID NO: 766, SEQ ID NO: 923, SEQ ID NO: 1080, SEQ ID NO: 1237, SEQ ID NO: 1394, and SEQ ID NO: 1551; SEQ ID NO: 767, SEQ ID NO: 924, SEQ ID NO: 1081, SEQ ID NO: 1238, SEQ ID NO: 1395, and SEQ ID NO: 1552; SEQ ID NO: 768, SEQ ID NO: 925, SEQ ID NO: 1082, SEQ ID NO: 1239, SEQ ID NO: 1396, and SEQ ID NO: 1553; SEQ ID NO: 769, SEQ ID NO: 926, SEQ ID NO: 1083, SEQ ID NO: 1240, SEQ ID NO: 1397, and SEQ ID NO: 1554; SEQ ID NO: 770, SEQ ID NO: 927, SEQ ID NO: 1084, SEQ ID NO: 1241, SEQ ID NO: 1398, and SEQ ID NO: 1555; SEQ ID NO: 771, SEQ ID NO: 928, SEQ ID NO: 1085, SEQ ID NO: 1242, SEQ ID NO: 1399, and SEQ ID NO: 1556; SEQ ID NO: 772, SEQ ID NO: 929, SEQ ID NO: 1086, SEQ ID NO: 1243, SEQ ID NO: 1400, and SEQ ID NO: 1557; SEQ ID NO: 773, SEQ ID NO: 930, SEQ ID NO: 1087, SEQ ID NO: 1244, SEQ ID NO: 1401, and SEQ ID NO: 1558; SEQ ID NO: 774, SEQ ID NO: 931, SEQ ID NO: 1088, SEQ ID NO: 1245, SEQ ID NO: 1402, and SEQ ID NO: 1559; SEQ ID NO: 775, SEQ ID NO: 932, SEQ ID NO: 1089, SEQ ID NO: 1246, SEQ ID NO: 1403, and SEQ ID NO: 1560; SEQ ID NO: 776, SEQ ID NO: 933, SEQ ID NO: 1090, SEQ ID NO: 1247, SEQ ID NO: 1404, and SEQ ID NO: 1561; SEQ ID NO: 777, SEQ ID NO: 934, SEQ ID NO: 1091, SEQ ID NO: 1248, SEQ ID NO: 1405, and SEQ ID NO: 1562; SEQ ID NO: 778, SEQ ID NO: 935, SEQ ID NO: 1092, SEQ ID NO: 1249, SEQ ID NO: 1406, and SEQ ID NO: 1563; SEQ ID NO: 779, SEQ ID NO: 936, SEQ ID NO: 1093, SEQ ID NO: 1250, SEQ ID NO: 1407, and SEQ ID NO: 1564; SEQ ID NO: 780, SEQ ID NO: 937, SEQ ID NO: 1094, SEQ ID NO: 1251, SEQ ID NO: 1408, and SEQ ID NO: 1565; SEQ ID NO: 781, SEQ ID NO: 938, SEQ ID NO: 1095, SEQ ID NO: 1252, SEQ ID NO: 1409, and SEQ ID NO: 1566; SEQ ID NO: 782, SEQ ID NO: 939, SEQ ID NO: 1096, SEQ ID NO: 1253, SEQ ID NO: 1410, and SEQ ID NO: 1567; SEQ ID NO: 783, SEQ ID NO: 940, SEQ ID NO: 1097, SEQ ID NO: 1254, SEQ ID NO: 1411, and SEQ ID NO: 1568; SEQ ID NO: 784, SEQ ID NO: 941, SEQ ID NO: 1098, SEQ ID NO: 1255, SEQ ID NO: 1412, and SEQ ID NO: 1569; and SEQ ID NO: 785, SEQ ID NO: 942, SEQ ID NO: 1099, SEQ ID NO: 1256, SEQ ID NO: 1413, and SEQ ID NO: 1570, wherein the antibody or functional fragment thereof comprises a cysteine or non-canonical amino acid amino acid substitution at one or more conjugation site(s) selected from the group consisting of D70 of the antibody light chain relative to reference sequence SEQ ID NO: 455, E276 of the antibody heavy chain relative to reference sequence SEQ ID NO: 612, and T363 of the antibody heavy chain relative to reference sequence SEQ ID NO: 612.

[0213] In one embodiment the antibody or fragment thereof comprises a CDRL1, a CDRL2, a CDRL3, a CDRH1, a CDRH2, and a CDRH3, wherein the antibody or functional fragment thereof comprises a cysteine or non-canonical amino acid amino acid substitution at one or more conjugation site(s) selected from the group consisting of D70 of the antibody light chain relative to reference sequence SEQ ID NO: 455, E276 of the antibody heavy chain relative to reference sequence SEQ ID NO: 612, and T363 of the antibody heavy chain relative to reference sequence SEQ ID NO: 612, encoded by a polynucleotide. In one embodiment the antibody or fragment thereof comprises a CDRL1, a CDRL2, a CDRL3, a CDRH1, a CDRH2, and a CDRH3, wherein the antibody or functional fragment thereof comprises a cysteine or non-canonical amino acid amino acid substitution at one or more conjugation site(s) selected from the group consisting of D70 of the antibody light chain relative to reference sequence SEQ ID NO: 455, E276 of the antibody heavy chain relative to reference sequence SEQ ID NO: 612, and T363 of the antibody heavy chain relative to reference sequence SEQ ID NO: 612, wherein each CDRL1, CDRL2, CDRL3, CDRH1, CDRH2, and CDRH3, respectively, is encoded by a sequence selected from the group consisting of SEQ ID NO: 2199, SEQ ID NO: 2356, SEQ ID NO: 2513, SEQ ID NO: 2670, SEQ ID NO: 2827, and SEQ ID NO: 2984; SEQ ID NO: 2200, SEQ ID NO: 2357, SEQ ID NO: 2514, SEQ ID NO: 2671, SEQ ID NO: 2828, and SEQ ID NO: 2985; SEQ ID NO: 2201, SEQ ID NO: 2358, SEQ ID NO: 2515, SEQ ID NO: 2672, SEQ ID NO: 2829, and SEQ ID NO: 2986; SEQ ID NO: 2202, SEQ ID NO: 2359, SEQ ID NO: 2516, SEQ ID NO: 2673, SEQ ID NO: 2830, and SEQ ID NO: 2987; SEQ ID NO: 2203, SEQ ID NO: 2360, SEQ ID NO: 2517, SEQ ID NO: 2674, SEQ ID NO: 2831, and SEQ ID NO: 2988; SEQ ID NO: 2204, SEQ ID NO: 2361, SEQ ID NO: 2518, SEQ ID NO: 2675, SEQ ID NO: 2832, and SEQ ID NO: 2989; SEQ ID NO: 2205, SEQ ID NO: 2362, SEQ ID NO: 2519, SEQ ID NO: 2676, SEQ ID NO: 2833, and SEQ ID NO: 2990; SEQ ID NO: 2206, SEQ ID NO: 2363, SEQ ID NO: 2520, SEQ ID NO: 2677, SEQ ID NO: 2834, and SEQ ID NO: 2991; SEQ ID NO: 2207, SEQ ID NO: 2364, SEQ ID NO: 2521, SEQ ID NO: 2678, SEQ ID NO: 2835, and SEQ ID NO: 2992; SEQ ID NO: 2208, SEQ ID NO: 2365, SEQ ID NO: 2522, SEQ ID NO: 2679, SEQ ID NO: 2836, and SEQ ID NO: 2993; SEQ ID NO: 2209, SEQ ID NO: 2366, SEQ ID NO: 2523, SEQ ID NO: 2680, SEQ ID NO: 2837, and SEQ ID NO: 2994; SEQ ID NO: 2210, SEQ ID NO: 2367, SEQ ID NO: 2524, SEQ ID NO: 2681, SEQ ID NO: 2838, and SEQ ID NO: 2995; SEQ ID NO: 2211, SEQ ID NO: 2368, SEQ ID NO: 2525, SEQ ID NO: 2682, SEQ ID NO: 2839, and SEQ ID NO: 2996; SEQ ID NO: 2212, SEQ ID NO: 2369, SEQ ID NO: 2526, SEQ ID NO: 2683, SEQ ID NO: 2840, and SEQ ID NO: 2997; SEQ ID NO: 2213, SEQ ID NO: 2370, SEQ ID NO: 2527, SEQ ID NO: 2684, SEQ ID NO: 2841, and SEQ ID NO: 2998; SEQ ID NO: 2214, SEQ ID NO: 2371, SEQ ID NO: 2528, SEQ ID NO: 2685, SEQ ID NO: 2842, and SEQ ID NO: 2999; SEQ ID NO: 2215, SEQ ID NO: 2372, SEQ ID NO: 2529, SEQ ID NO: 2686, SEQ ID NO: 2843, and SEQ ID NO: 3000; SEQ ID NO: 2216, SEQ ID NO: 2373, SEQ ID NO: 2530, SEQ ID NO: 2687, SEQ ID NO: 2844, and SEQ ID NO: 3001; SEQ ID NO: 2217, SEQ ID NO: 2374, SEQ ID NO: 2531, SEQ ID NO: 2688, SEQ ID NO: 2845, and SEQ ID NO: 3002; SEQ ID NO: 2218, SEQ ID NO: 2375, SEQ ID NO: 2532, SEQ ID NO: 2689, SEQ ID NO: 2846, and SEQ ID NO: 3003; SEQ ID NO: 2219, SEQ ID NO: 2376, SEQ ID NO: 2533, SEQ ID NO: 2690, SEQ ID NO: 2847, and SEQ ID NO: 3004; SEQ ID NO: 2220, SEQ ID NO: 2377, SEQ ID NO: 2534, SEQ ID NO: 2691, SEQ ID NO: 2848, and SEQ ID NO: 3005; SEQ ID NO: 2221, SEQ ID NO: 2378, SEQ ID NO: 2535, SEQ ID NO: 2692, SEQ ID NO: 2849, and SEQ ID NO: 3006; SEQ ID NO: 2222, SEQ ID NO: 2379, SEQ ID NO: 2536, SEQ ID NO: 2693, SEQ ID NO: 2850, and SEQ ID NO: 3007; SEQ ID NO: 2223, SEQ ID NO: 2380, SEQ ID NO: 2537, SEQ ID NO: 2694, SEQ ID NO: 2851, and SEQ ID NO: 3008; SEQ ID NO: 2224, SEQ ID NO: 2381, SEQ ID NO: 2538, SEQ ID NO: 2695, SEQ ID NO: 2852, and SEQ ID NO: 3009; SEQ ID NO: 2225, SEQ ID NO: 2382, SEQ ID NO: 2539, SEQ ID NO: 2696, SEQ ID NO: 2853, and SEQ ID NO: 3010; SEQ ID NO: 2226, SEQ ID NO: 2383, SEQ ID NO: 2540, SEQ ID NO: 2697, SEQ ID NO: 2854, and SEQ ID NO: 3011; SEQ ID NO: 2227, SEQ ID NO: 2384, SEQ ID NO: 2541, SEQ ID NO: 2698, SEQ ID NO: 2855, and SEQ ID NO: 3012; SEQ ID NO: 2228, SEQ ID NO: 2385, SEQ ID NO: 2542, SEQ ID NO: 2699, SEQ ID NO: 2856, and SEQ ID NO: 3013; SEQ ID NO: 2229, SEQ ID NO: 2386, SEQ ID NO: 2543, SEQ ID NO: 2700, SEQ ID NO: 2857, and SEQ ID NO: 3014; SEQ ID NO: 2230, SEQ ID NO: 2387, SEQ ID NO: 2544, SEQ ID NO: 2701, SEQ ID NO: 2858, and SEQ ID NO: 3015; SEQ ID NO: 2231, SEQ ID NO: 2388, SEQ ID NO: 2545, SEQ ID NO: 2702, SEQ ID NO: 2859, and SEQ ID NO: 3016; SEQ ID NO: 2232, SEQ ID NO: 2389, SEQ ID NO: 2546, SEQ ID NO: 2703, SEQ ID NO: 2860, and SEQ ID NO: 3017; SEQ ID NO: 2233, SEQ ID NO: 2390, SEQ ID NO: 2547, SEQ ID NO: 2704, SEQ ID NO: 2861, and SEQ ID NO: 3018; SEQ ID NO: 2234, SEQ ID NO: 2391, SEQ ID NO: 2548, SEQ ID NO: 2705, SEQ ID NO: 2862, and SEQ ID NO: 3019; SEQ ID NO: 2235, SEQ ID NO: 2392, SEQ ID NO: 2549, SEQ ID NO: 2706, SEQ ID NO: 2863, and SEQ ID NO: 3020; SEQ ID NO: 2236, SEQ ID NO: 2393, SEQ ID NO: 2550, SEQ ID NO: 2707, SEQ ID NO: 2864, and SEQ ID NO: 3021; SEQ ID NO: 2237, SEQ ID NO: 2394, SEQ ID NO: 2551, SEQ ID NO: 2708, SEQ ID NO: 2865, and SEQ ID NO: 3022; SEQ ID NO: 2238, SEQ ID NO: 2395, SEQ ID NO: 2552, SEQ ID NO: 2709, SEQ ID NO: 2866, and SEQ ID NO: 3023; SEQ ID NO: 2239, SEQ ID NO: 2396, SEQ ID NO: 2553, SEQ ID NO: 2710, SEQ ID NO: 2867, and SEQ ID NO: 3024; SEQ ID NO: 2240, SEQ ID NO: 2397, SEQ ID NO: 2554, SEQ ID NO: 2711, SEQ ID NO: 2868, and SEQ ID NO: 3025 SEQ ID NO: 2241, SEQ ID NO: 2398, SEQ ID NO: 2555, SEQ ID NO: 2712, SEQ ID NO: 2869, and SEQ ID NO: 3026; SEQ ID NO: 2242, SEQ ID NO: 2399, SEQ ID NO: 2556, SEQ ID NO: 2713, SEQ ID NO: 2870, and SEQ ID NO: 3027; SEQ ID NO: 2243, SEQ ID NO: 2400, SEQ ID NO: 2557, SEQ ID NO: 2714, SEQ ID NO: 2871, and SEQ ID NO: 3028; SEQ ID NO: 2244, SEQ ID NO: 2401, SEQ ID NO: 2558, SEQ ID NO: 2715, SEQ ID NO: 2872, and SEQ ID NO: 3029; SEQ ID NO: 2245, SEQ ID NO: 2402, SEQ ID NO: 2559, SEQ ID NO: 2716, SEQ ID NO: 2873, and SEQ ID NO: 3030; SEQ ID NO: 2246, SEQ ID NO: 2403, SEQ ID NO: 2560, SEQ ID NO: 2717, SEQ ID NO: 2874, and SEQ ID NO: 3031; SEQ ID NO: 2247, SEQ ID NO: 2404, SEQ ID NO: 2561, SEQ ID NO: 2718, SEQ ID NO: 2875, and SEQ ID NO: 3032; SEQ ID NO: 2248, SEQ ID NO: 2405, SEQ ID NO: 2562, SEQ ID NO: 2719, SEQ ID NO: 2876, and SEQ ID NO: 3033; SEQ ID NO: 2249, SEQ ID NO: 2406, SEQ ID NO: 2563, SEQ ID NO: 2720, SEQ ID NO: 2877, and SEQ ID NO: 3034; SEQ ID NO: 2250, SEQ ID NO: 2407, SEQ ID NO: 2564, SEQ ID NO: 2721, SEQ ID NO: 2878, and SEQ ID NO: 3035; SEQ ID NO: 2251, SEQ ID NO: 2408, SEQ ID NO: 2565, SEQ ID NO: 2722, SEQ ID NO: 2879, and SEQ ID NO: 3036; SEQ ID NO: 2252, SEQ ID NO: 2409, SEQ ID NO: 2566, SEQ ID NO: 2723, SEQ ID NO: 2880, and SEQ ID NO: 3037; SEQ ID NO: 2253, SEQ ID NO: 2410, SEQ ID NO: 2567, SEQ ID NO: 2724, SEQ ID NO: 2881, and SEQ ID NO: 3038; SEQ ID NO: 2254, SEQ ID NO: 2411, SEQ ID NO: 2568, SEQ ID NO: 2725, SEQ ID NO: 2882, and SEQ ID NO: 3039; SEQ ID NO: 2255, SEQ ID NO: 2412, SEQ ID NO: 2569, SEQ ID NO: 2726, SEQ ID NO: 2883, and SEQ ID NO: 3040; SEQ ID NO: 2256, SEQ ID NO: 2413, SEQ ID NO: 2570, SEQ ID NO: 2727, SEQ ID NO: 2884, and SEQ ID NO: 3041; SEQ ID NO: 2257, SEQ ID NO: 2414, SEQ ID NO: 2571, SEQ ID NO: 2728, SEQ ID NO: 2885, and SEQ ID NO: 3042; SEQ ID NO: 2258, SEQ ID NO: 2415, SEQ ID NO: 2572, SEQ ID NO: 2729, SEQ ID NO: 2886, and SEQ ID NO: 3043; SEQ ID NO: 2259, SEQ ID NO: 2416, SEQ ID NO: 2573, SEQ ID NO: 2730, SEQ ID NO: 2887, and SEQ ID NO: 3044; SEQ ID NO: 2260, SEQ ID NO: 2417, SEQ ID NO: 2574, SEQ ID NO: 2731, SEQ ID NO: 2888, and SEQ ID NO: 3045; SEQ ID NO: 2261, SEQ ID NO: 2418, SEQ ID NO: 2575, SEQ ID NO: 2732, SEQ ID NO: 2889, and SEQ ID NO: 3046; SEQ ID NO: 2262, SEQ ID NO: 2419, SEQ ID NO: 2576, SEQ ID NO: 2733, SEQ ID NO: 2890, and SEQ ID NO: 3047; SEQ ID NO: 2263, SEQ ID NO: 2420, SEQ ID NO: 2577, SEQ ID NO: 2734, SEQ ID NO: 2891, and SEQ ID NO: 3048; SEQ ID NO: 2264, SEQ ID NO: 2421, SEQ ID NO: 2578, SEQ ID NO: 2735, SEQ ID NO: 2892, and SEQ ID NO: 3049; SEQ ID NO: 2265, SEQ ID NO: 2422, SEQ ID NO: 2579, SEQ ID NO: 2736, SEQ ID NO: 2893, and SEQ ID NO: 3050; SEQ ID NO: 2266, SEQ ID NO: 2423, SEQ ID NO: 2580, SEQ ID NO: 2737, SEQ ID NO: 2894, and SEQ ID NO: 3051; SEQ ID NO: 2267, SEQ ID NO: 2424, SEQ ID NO: 2581, SEQ ID NO: 2738, SEQ ID NO: 2895, and SEQ ID NO: 3052; SEQ ID NO: 2268, SEQ ID NO: 2425, SEQ ID NO: 2582, SEQ ID NO: 2739, SEQ ID NO: 2896, and SEQ ID NO: 3053; SEQ ID NO: 2269, SEQ ID NO: 2426, SEQ ID NO: 2583, SEQ ID NO: 2740, SEQ ID NO: 2897, and SEQ ID NO: 3054; SEQ ID NO: 2270, SEQ ID NO: 2427, SEQ ID NO: 2584, SEQ ID NO: 2741, SEQ ID NO: 2898, and SEQ ID NO: 3055; SEQ ID NO: 2271, SEQ ID NO: 2428, SEQ ID NO: 2585, SEQ ID NO: 2742, SEQ ID NO: 2899, and SEQ ID NO: 3056; SEQ ID NO: 2272, SEQ ID NO: 2429, SEQ ID NO: 2586, SEQ ID NO: 2743, SEQ ID NO: 2900, and SEQ ID NO: 3057; SEQ ID NO: 2273, SEQ ID NO: 2430, SEQ ID NO: 2587, SEQ ID NO: 2744, SEQ ID NO: 2901, and SEQ ID NO: 3058; SEQ ID NO: 2274, SEQ ID NO: 2431, SEQ ID NO: 2588, SEQ ID NO: 2745, SEQ ID NO: 2902, and SEQ ID NO: 3059; SEQ ID NO: 2275, SEQ ID NO: 2432, SEQ ID NO: 2589, SEQ ID NO: 2746, SEQ ID NO: 2903, and SEQ ID NO: 3060; SEQ ID NO: 2276, SEQ ID NO: 2433, SEQ ID NO: 2590, SEQ ID NO: 2747, SEQ ID NO: 2904, and SEQ ID NO: 3061; SEQ ID NO: 2277, SEQ ID NO: 2434, SEQ ID NO: 2591, SEQ ID NO: 2748, SEQ ID NO: 2905, and SEQ ID NO: 3062; SEQ ID NO: 2278, SEQ ID NO: 2435, SEQ ID NO: 2592, SEQ ID NO: 2749, SEQ ID NO: 2906, and SEQ ID NO: 3063; SEQ ID NO: 2279, SEQ ID NO: 2436, SEQ ID NO: 2593, SEQ ID NO: 2750, SEQ ID NO: 2907, and SEQ ID NO: 3064; SEQ ID NO: 2280, SEQ ID NO: 2437, SEQ ID NO: 2594, SEQ ID NO: 2751, SEQ ID NO: 2908, and SEQ ID NO: 3065; SEQ ID NO: 2281, SEQ ID NO: 2438, SEQ ID NO: 2595, SEQ ID NO: 2752, SEQ ID NO: 2909, and SEQ ID NO: 3066; SEQ ID NO: 2282, SEQ ID NO: 2439, SEQ ID NO: 2596, SEQ ID NO: 2753, SEQ ID NO: 2910, and SEQ ID NO: 3067; SEQ ID NO: 2283, SEQ ID NO: 2440, SEQ ID NO: 2597, SEQ ID NO: 2754, SEQ ID NO: 2911, and SEQ ID NO: 3068; SEQ ID NO: 2284, SEQ ID NO: 2441, SEQ ID NO: 2598, SEQ ID NO: 2755, SEQ ID NO: 2912, and SEQ ID NO: 3069; SEQ ID NO: 2285, SEQ ID NO: 2442, SEQ ID NO: 2599, SEQ ID NO: 2756, SEQ ID NO: 2913, and SEQ ID NO: 3070; SEQ ID NO: 2286, SEQ ID NO: 2443, SEQ ID NO: 2600, SEQ ID NO: 2757, SEQ ID NO: 2914, and SEQ ID NO: 3071; SEQ ID NO: 2287, SEQ ID NO: 2444, SEQ ID NO: 2601, SEQ ID NO: 2758, SEQ ID NO: 2915, and SEQ ID NO: 3072; SEQ ID NO: 2288, SEQ ID NO: 2445, SEQ ID NO: 2602, SEQ ID NO: 2759, SEQ ID NO: 2916, and SEQ ID NO: 3073; SEQ ID NO: 2289, SEQ ID NO: 2446, SEQ ID NO: 2603, SEQ ID NO: 2760, SEQ ID NO: 2917, and SEQ ID NO: 3074; SEQ ID NO: 2290, SEQ ID NO: 2447, SEQ ID NO: 2604, SEQ ID NO: 2761, SEQ ID NO: 2918, and SEQ ID NO: 3075; SEQ ID NO: 2291, SEQ ID NO: 2448, SEQ ID NO: 2605, SEQ ID NO: 2762, SEQ ID NO: 2919, and SEQ ID NO: 3076 SEQ ID NO: 2292, SEQ ID NO: 2449, SEQ ID NO: 2606, SEQ ID NO: 2763, SEQ ID NO: 2920, and SEQ ID NO: 3077; SEQ ID NO: 2293, SEQ ID NO: 2450, SEQ ID NO: 2607, SEQ ID NO: 2764, SEQ ID NO: 2921, and SEQ ID NO: 3078; SEQ ID NO: 2294, SEQ ID NO: 2451, SEQ ID NO: 2608, SEQ ID NO: 2765, SEQ ID NO: 2922, and SEQ ID NO: 3079; SEQ ID NO: 2295, SEQ ID NO: 2452, SEQ ID NO: 2609, SEQ ID NO: 2766, SEQ ID NO: 2923, and SEQ ID NO: 3080; SEQ ID NO: 2296, SEQ ID NO: 2453, SEQ ID NO: 2610, SEQ ID NO: 2767, SEQ ID NO: 2924, and SEQ ID NO: 3081; SEQ ID NO: 2297, SEQ ID NO: 2454, SEQ ID NO: 2611, SEQ ID NO: 2768, SEQ ID NO: 2925, and SEQ ID NO: 3082; SEQ ID NO: 2298, SEQ ID NO: 2455, SEQ ID NO: 2612, SEQ ID NO: 2769, SEQ ID NO: 2926, and SEQ ID NO: 3083; SEQ ID NO: 2299, SEQ ID NO: 2456, SEQ ID NO: 2613, SEQ ID NO: 2770, SEQ ID NO: 2927, and SEQ ID NO: 3084; SEQ ID NO: 2300, SEQ ID NO: 2457, SEQ ID NO: 2614, SEQ ID NO: 2771, SEQ ID NO: 2928, and SEQ ID NO: 3085; SEQ ID NO: 2301, SEQ ID NO: 2458, SEQ ID NO: 2615, SEQ ID NO: 2772, SEQ ID NO: 2929, and SEQ ID NO: 3086; SEQ ID NO: 2302, SEQ ID NO: 2459, SEQ ID NO: 2616, SEQ ID NO: 2773, SEQ ID NO: 2930, and SEQ ID NO: 3087; SEQ ID NO: 2303, SEQ ID NO: 2460, SEQ ID NO: 2617, SEQ ID NO: 2774, SEQ ID NO: 2931, and SEQ ID NO: 3088; SEQ ID NO: 2304, SEQ ID NO: 2461, SEQ ID NO: 2618, SEQ ID NO: 2775, SEQ ID NO: 2932, and SEQ ID NO: 3089; SEQ ID NO: 2305, SEQ ID NO: 2462, SEQ ID NO: 2619, SEQ ID NO: 2776, SEQ ID NO: 2933, and SEQ ID NO: 3090; SEQ ID NO: 2306, SEQ ID NO: 2463, SEQ ID NO: 2620, SEQ ID NO: 2777, SEQ ID NO: 2934, and SEQ ID NO: 3091; SEQ ID NO: 2307, SEQ ID NO: 2464, SEQ ID NO: 2621, SEQ ID NO: 2778, SEQ ID NO: 2935, and SEQ ID NO: 3092; SEQ ID NO: 2308, SEQ ID NO: 2465, SEQ ID NO: 2622, SEQ ID NO: 2779, SEQ ID NO: 2936, and SEQ ID NO: 3093; SEQ ID NO: 2309, SEQ ID NO: 2466, SEQ ID NO: 2623, SEQ ID NO: 2780, SEQ ID NO: 2937, and SEQ ID NO: 3094; SEQ ID NO: 2310, SEQ ID NO: 2467, SEQ ID NO: 2624, SEQ ID NO: 2781, SEQ ID NO: 2938, and SEQ ID NO: 3095; SEQ ID NO: 2311, SEQ ID NO: 2468, SEQ ID NO: 2625, SEQ ID NO: 2782, SEQ ID NO: 2939, and SEQ ID NO: 3096; SEQ ID NO: 2312, SEQ ID NO: 2469, SEQ ID NO: 2626, SEQ ID NO: 2783, SEQ ID NO: 2940, and SEQ ID NO: 3097; SEQ ID NO: 2313, SEQ ID NO: 2470, SEQ ID NO: 2627, SEQ ID NO: 2784, SEQ ID NO: 2941, and SEQ ID NO: 3098; SEQ ID NO: 2314, SEQ ID NO: 2471, SEQ ID NO: 2628, SEQ ID NO: 2785, SEQ ID NO: 2942, and SEQ ID NO: 3099; SEQ ID NO: 2315, SEQ ID NO: 2472, SEQ ID NO: 2629, SEQ ID NO: 2786, SEQ ID NO: 2943, and SEQ ID NO: 3100; SEQ ID NO: 2316, SEQ ID NO: 2473, SEQ ID NO: 2630, SEQ ID NO: 2787, SEQ ID NO: 2944, and SEQ ID NO: 3101; SEQ ID NO: 2317, SEQ ID NO: 2474, SEQ ID NO: 2631, SEQ ID NO: 2788, SEQ ID NO: 2945, and SEQ ID NO: 3102; SEQ ID NO: 2318, SEQ ID NO: 2475, SEQ ID NO: 2632, SEQ ID NO: 2789, SEQ ID NO: 2946, and SEQ ID NO: 3103; SEQ ID NO: 2319, SEQ ID NO: 2476, SEQ ID NO: 2633, SEQ ID NO: 2790, SEQ ID NO: 2947, and SEQ ID NO: 3104; SEQ ID NO: 2320, SEQ ID NO: 2477, SEQ ID NO: 2634, SEQ ID NO: 2791, SEQ ID NO: 2948, and SEQ ID NO: 3105; SEQ ID NO: 2321, SEQ ID NO: 2478, SEQ ID NO: 2635, SEQ ID NO: 2792, SEQ ID NO: 2949, and SEQ ID NO: 3106; SEQ ID NO: 2322, SEQ ID NO: 2479, SEQ ID NO: 2636, SEQ ID NO: 2793, SEQ ID NO: 2950, and SEQ ID NO: 3107; SEQ ID NO: 2323, SEQ ID NO: 2480, SEQ ID NO: 2637, SEQ ID NO: 2794, SEQ ID NO: 2951, and SEQ ID NO: 3108; SEQ ID NO: 2324, SEQ ID NO: 2481, SEQ ID NO: 2638, SEQ ID NO: 2795, SEQ ID NO: 2952, and SEQ ID NO: 3109; SEQ ID NO: 2325, SEQ ID NO: 2482, SEQ ID NO: 2639, SEQ ID NO: 2796, SEQ ID NO: 2953, and SEQ ID NO: 3110; SEQ ID NO: 2326, SEQ ID NO: 2483, SEQ ID NO: 2640, SEQ ID NO: 2797, SEQ ID NO: 2954, and SEQ ID NO: 3111; SEQ ID NO: 2327, SEQ ID NO: 2484, SEQ ID NO: 2641, SEQ ID NO: 2798, SEQ ID NO: 2955, and SEQ ID NO: 3112; SEQ ID NO: 2328, SEQ ID NO: 2485, SEQ ID NO: 2642, SEQ ID NO: 2799, SEQ ID NO: 2956, and SEQ ID NO: 3113; SEQ ID NO: 2329, SEQ ID NO: 2486, SEQ ID NO: 2643, SEQ ID NO: 2800, SEQ ID NO: 2957, and SEQ ID NO: 3114; SEQ ID NO: 2330, SEQ ID NO: 2487, SEQ ID NO: 2644, SEQ ID NO: 2801, SEQ ID NO: 2958, and SEQ ID NO: 3115; SEQ ID NO: 2331, SEQ ID NO: 2488, SEQ ID NO: 2645, SEQ ID NO: 2802, SEQ ID NO: 2959, and SEQ ID NO: 3116; SEQ ID NO: 2332, SEQ ID NO: 2489, SEQ ID NO: 2646, SEQ ID NO: 2803, SEQ ID NO: 2960, and SEQ ID NO: 3117; SEQ ID NO: 2333, SEQ ID NO: 2490, SEQ ID NO: 2647, SEQ ID NO: 2804, SEQ ID NO: 2961, and SEQ ID NO: 3118; SEQ ID NO: 2334, SEQ ID NO: 2491, SEQ ID NO: 2648, SEQ ID NO: 2805, SEQ ID NO: 2962, and SEQ ID NO: 3119; SEQ ID NO: 2335, SEQ ID NO: 2492, SEQ ID NO: 2649, SEQ ID NO: 2806, SEQ ID NO: 2963, and SEQ ID NO: 3120; SEQ ID NO: 2336, SEQ ID NO: 2493, SEQ ID NO: 2650, SEQ ID NO: 2807, SEQ ID NO: 2964, and SEQ ID NO: 3121; SEQ ID NO: 2337, SEQ ID NO: 2494, SEQ ID NO: 2651, SEQ ID NO: 2808, SEQ ID NO: 2965, and SEQ ID NO: 3122; SEQ ID NO: 2338, SEQ ID NO: 2495, SEQ ID NO: 2652, SEQ ID NO: 2809, SEQ ID NO: 2966, and SEQ ID NO: 3123; SEQ ID NO: 2339, SEQ ID NO: 2496, SEQ ID NO: 2653, SEQ ID NO: 2810, SEQ ID NO: 2967, and SEQ ID NO: 3124; SEQ ID NO: 2340, SEQ ID NO: 2497, SEQ ID NO: 2654, SEQ ID NO: 2811, SEQ ID NO: 2968, and SEQ ID NO: 3125; SEQ ID NO: 2341, SEQ ID NO: 2498, SEQ ID NO: 2655, SEQ ID NO: 2812, SEQ ID NO: 2969, and SEQ ID NO: 3126; SEQ ID NO: 2342, SEQ ID NO: 2499, SEQ ID NO: 2656, SEQ ID NO: 2813, SEQ ID NO: 2970, and SEQ ID NO: 3127 SEQ ID NO: 2343, SEQ ID NO: 2500, SEQ ID NO: 2657, SEQ ID NO: 2814, SEQ ID NO: 2971, and SEQ ID NO: 3128; SEQ ID NO: 2344, SEQ ID NO: 2501, SEQ ID NO: 2658, SEQ ID NO: 2815, SEQ ID NO: 2972, and SEQ ID NO: 3129; SEQ ID NO: 2345, SEQ ID NO: 2502, SEQ ID NO: 2659, SEQ ID NO: 2816, SEQ ID NO: 2973, and SEQ ID NO: 3130; SEQ ID NO: 2346, SEQ ID NO: 2503, SEQ ID NO: 2660, SEQ ID NO: 2817, SEQ ID NO: 2974, and SEQ ID NO: 3131; SEQ ID NO: 2347, SEQ ID NO: 2504, SEQ ID NO: 2661, SEQ ID NO: 2818, SEQ ID NO: 2975, and SEQ ID NO: 3132; SEQ ID NO: 2348, SEQ ID NO: 2505, SEQ ID NO: 2662, SEQ ID NO: 2819, SEQ ID NO: 2976, and SEQ ID NO: 3133; SEQ ID NO: 2349, SEQ ID NO: 2506, SEQ ID NO: 2663, SEQ ID NO: 2820, SEQ ID NO: 2977, and SEQ ID NO: 3134; SEQ ID NO: 2350, SEQ ID NO: 2507, SEQ ID NO: 2664, SEQ ID NO: 2821, SEQ ID NO: 2978, and SEQ ID NO: 3135; SEQ ID NO: 2351, SEQ ID NO: 2508, SEQ ID NO: 2665, SEQ ID NO: 2822, SEQ ID NO: 2979, and SEQ ID NO: 3136; SEQ ID NO: 2352, SEQ ID NO: 2509, SEQ ID NO: 2666, SEQ ID NO: 2823, SEQ ID NO: 2980, and SEQ ID NO: 3137; SEQ ID NO: 2353, SEQ ID NO: 2510, SEQ ID NO: 2667, SEQ ID NO: 2824, SEQ ID NO: 2981, and SEQ ID NO: 3138; SEQ ID NO: 2354, SEQ ID NO: 2511, SEQ ID NO: 2668, SEQ ID NO: 2825, SEQ ID NO: 2982, and SEQ ID NO: 3139; and SEQ ID NO: 2355, SEQ ID NO: 2512, SEQ ID NO: 2669, SEQ ID NO: 2826, SEQ ID NO: 2983, and SEQ ID NO: 3140.

[0214] In another aspect, an antigen binding protein includes 1, 2, 3, 4, 5, or 6 variant forms of the CDRs listed in TABLES 4A and 4B, each having at least 80%, 85%, 90%, 95%, 96%, 97%, 98%, or 99% sequence identity to a CDR sequence listed in TABLES 4A and 4B. Some antigen binding proteins include 1, 2, 3, 4, 5, or 6 of the CDRs listed in TABLES 4A and 4B, each or collectively differing by no more than 1, 2, 3, 4 or 5 amino acids from the CDRs listed in this table.

[0215] In various other embodiments, the antigen binding protein is derived from such antibodies. For instance, in one aspect, the antigen binding protein comprises 1, 2, 3, 4, 5 or all 6 of the CDRs listed in one of the rows for any particular antibody listed in TABLES 4A and 4B. In another aspect, an antigen binding protein includes 1, 2, 3, 4, 5, or 6 variant forms of the CDRs listed in one of the rows for an antibody in TABLES 4A and 4B, each CDR having at least 80%, 85%, 90%, 95%, 96%, 97%, 98%, or 99% sequence identity to a CDR sequence listed in TABLES 4A and 4B. Some antigen binding proteins include 1, 2, 3, 4, 5, or 6 of the CDRs listed in one of the rows of TABLES 4A and 4B, each differing by no more than 1, 2, 3, 4 or 5 amino acids from the CDRs listed in these tables. In another aspect, the antigen binding protein comprises all 6 of the CDRS listed in a row of TABLES 4A and 4B and the total number of amino acid changes to the CDRs collectively is no more than 1, 2, 3, 4, or 5 amino acids.

[0216] In one embodiment the antibody or fragment thereof comprises a light chain comprising a sequence selected from the group consisting of SEQ ID NOs: 472-628 and a heavy chain comprising a sequence selected from the group consisting of SEQ ID NOs: 472-628, wherein the antibody or functional fragment thereof comprises a cysteine or non-canonical amino acid amino acid substitution at one or more conjugation site(s) selected from the group consisting of D70 of the antibody light chain relative to reference sequence SEQ ID NO: 455, E276 of the antibody heavy chain relative to reference sequence SEQ ID NO: 612, and T363 of the antibody heavy chain relative to reference sequence SEQ ID NO: 612. In one embodiment the antibody or fragment thereof comprises a combination of a light chain and a heavy chain selected from the group consisting of a light chain comprising SEQ ID NO: 315 and a heavy chain comprising SEQ ID NO: 472; a light chain comprising SEQ ID NO: 316 and a heavy chain comprising SEQ ID NO: 473; a light chain comprising SEQ ID NO: 317 and a heavy chain comprising SEQ ID NO: 474; a light chain comprising SEQ ID NO: 318 and a heavy chain comprising SEQ ID NO: 475; a light chain comprising SEQ ID NO: 319 and a heavy chain comprising SEQ ID NO: 476; a light chain comprising SEQ ID NO: 320 and a heavy chain comprising SEQ ID NO: 477; a light chain comprising SEQ ID NO: 321 and a heavy chain comprising SEQ ID NO: 478; a light chain comprising SEQ ID NO: 322 and a heavy chain comprising SEQ ID NO: 479; a light chain comprising SEQ ID NO: 323 and a heavy chain comprising SEQ ID NO: 480; a light chain comprising SEQ ID NO: 324 and a heavy chain comprising SEQ ID NO: 481; a light chain comprising SEQ ID NO: 325 and a heavy chain comprising SEQ ID NO: 482; a light chain comprising SEQ ID NO: 326 and a heavy chain comprising SEQ ID NO: 483; a light chain comprising SEQ ID NO: 327 and a heavy chain comprising SEQ ID NO: 484; a light chain comprising SEQ ID NO: 328 and a heavy chain comprising SEQ ID NO: 485; a light chain comprising SEQ ID NO: 329 and a heavy chain comprising SEQ ID NO: 486; a light chain comprising SEQ ID NO: 330 and a heavy chain comprising SEQ ID NO: 487; a light chain comprising SEQ ID NO: 331 and a heavy chain comprising SEQ ID NO: 488; a light chain comprising SEQ ID NO: 332 and a heavy chain comprising SEQ ID NO: 489; a light chain comprising SEQ ID NO: 333 and a heavy chain comprising SEQ ID NO: 490; a light chain comprising SEQ ID NO: 334 and a heavy chain comprising SEQ ID NO: 491; a light chain comprising SEQ ID NO: 335 and a heavy chain comprising SEQ ID NO: 492; a light chain comprising SEQ ID NO: 336 and a heavy chain comprising SEQ ID NO: 493; a light chain comprising SEQ ID NO: 337 and a heavy chain comprising SEQ ID NO: 494; a light chain comprising SEQ ID NO: 338 and a heavy chain comprising SEQ ID NO: 495; a light chain comprising SEQ ID NO: 339 and a heavy chain comprising SEQ ID NO: 496; a light chain comprising SEQ ID NO: 340 and a heavy chain comprising SEQ ID NO: 497; a light chain comprising SEQ ID NO: 341 and a heavy chain comprising SEQ ID NO: 498; a light chain comprising SEQ ID NO: 342 and a heavy chain comprising SEQ ID NO: 499; a light chain comprising SEQ ID NO: 343 and a heavy chain comprising SEQ ID NO: 500; a light chain comprising SEQ ID NO: 344 and a heavy chain comprising SEQ ID NO: 501; a light chain comprising SEQ ID NO: 345 and a heavy chain comprising SEQ ID NO: 502; a light chain comprising SEQ ID NO: 346 and a heavy chain comprising SEQ ID NO: 503; a light chain comprising SEQ ID NO: 347 and a heavy chain comprising SEQ ID NO: 504; a light chain comprising SEQ ID NO: 348 and a heavy chain comprising SEQ ID NO: 505; a light chain comprising SEQ ID NO: 349 and a heavy chain comprising SEQ ID NO: 506; a light chain comprising SEQ ID NO: 350 and a heavy chain comprising SEQ ID NO: 507; a light chain comprising SEQ ID NO: 351 and a heavy chain comprising SEQ ID NO: 508; a light chain comprising SEQ ID NO: 352 and a heavy chain comprising SEQ ID NO: 509; a light chain comprising SEQ ID NO: 353 and a heavy chain comprising SEQ ID NO: 510; a light chain comprising SEQ ID NO: 354 and a heavy chain comprising SEQ ID NO: 511; a light chain comprising SEQ ID NO: 355 and a heavy chain comprising SEQ ID NO: 512; a light chain comprising SEQ ID NO: 356 and a heavy chain comprising SEQ ID NO: 513; a light chain comprising SEQ ID NO: 357 and a heavy chain comprising SEQ ID NO: 514; a light chain comprising SEQ ID NO: 358 and a heavy chain comprising SEQ ID NO: 515; a light chain comprising SEQ ID NO: 359 and a heavy chain comprising SEQ ID NO: 516; a light chain comprising SEQ ID NO: 360 and a heavy chain comprising SEQ ID NO: 517; a light chain comprising SEQ ID NO: 361 and a heavy chain comprising SEQ ID NO: 518; a light chain comprising SEQ ID NO: 362 and a heavy chain comprising SEQ ID NO: 519; a light chain comprising SEQ ID NO: 363 and a heavy chain comprising SEQ ID NO: 520; a light chain comprising SEQ ID NO: 364 and a heavy chain comprising SEQ ID NO: 521; a light chain comprising SEQ ID NO: 365 and a heavy chain comprising SEQ ID NO: 522; a light chain comprising SEQ ID NO: 366 and a heavy chain comprising SEQ ID NO: 523; a light chain comprising SEQ ID NO: 367 and a heavy chain comprising SEQ ID NO: 524; a light chain comprising SEQ ID NO: 368 and a heavy chain comprising SEQ ID NO: 525; a light chain comprising SEQ ID NO: 369 and a heavy chain comprising SEQ ID NO: 526; a light chain comprising SEQ ID NO: 370 and a heavy chain comprising SEQ ID NO: 527; a light chain comprising SEQ ID NO: 371 and a heavy chain comprising SEQ ID NO: 528; a light chain comprising SEQ ID NO: 372 and a heavy chain comprising SEQ ID NO: 529; a light chain comprising SEQ ID NO: 373 and a heavy chain comprising SEQ ID NO: 530; a light chain comprising SEQ ID NO: 374 and a heavy chain comprising SEQ ID NO: 531; a light chain comprising SEQ ID NO: 375 and a heavy chain comprising SEQ ID NO: 532; a light chain comprising SEQ ID NO: 376 and a heavy chain comprising SEQ ID NO: 533; a light chain comprising SEQ ID NO: 377 and a heavy chain comprising SEQ ID NO: 534; a light chain comprising SEQ ID NO: 378 and a heavy chain comprising SEQ ID NO: 535; a light chain comprising SEQ ID NO: 379 and a heavy chain comprising SEQ ID NO: 536; a light chain comprising SEQ ID NO: 380 and a heavy chain comprising SEQ ID NO: 537; a light chain comprising SEQ ID NO: 381 and a heavy chain comprising SEQ ID NO: 538; a light chain comprising SEQ ID NO: 382 and a heavy chain comprising SEQ ID NO: 539; a light chain comprising SEQ ID NO: 383 and a heavy chain comprising SEQ ID NO: 540; a light chain comprising SEQ ID NO: 384 and a heavy chain comprising SEQ ID NO: 541; a light chain comprising SEQ ID NO: 385 and a heavy chain comprising SEQ ID NO: 542; a light chain comprising SEQ ID NO: 386 and a heavy chain comprising SEQ ID NO: 543; a light chain comprising SEQ ID NO: 387 and a heavy chain comprising SEQ ID NO: 544; a light chain comprising SEQ ID NO: 388 and a heavy chain comprising SEQ ID NO: 545; a light chain comprising SEQ ID NO: 389 and a heavy chain comprising SEQ ID NO: 546; a light chain comprising SEQ ID NO: 390 and a heavy chain comprising SEQ ID NO: 547; a light chain comprising SEQ ID NO: 391 and a heavy chain comprising SEQ ID NO: 548; a light chain comprising SEQ ID NO: 392 and a heavy chain comprising SEQ ID NO: 549; a light chain comprising SEQ ID NO: 393 and a heavy chain comprising SEQ ID NO: 550; a light chain comprising SEQ ID NO: 394 and a heavy chain comprising SEQ ID NO: 551; a light chain comprising SEQ ID NO: 395 and a heavy chain comprising SEQ ID NO: 552; a light chain comprising SEQ ID NO: 396 and a heavy chain comprising SEQ ID NO: 553; a light chain comprising SEQ ID NO: 397 and a heavy chain comprising SEQ ID NO: 554; a light chain comprising SEQ ID NO: 398 and a heavy chain comprising SEQ ID NO: 555; a light chain comprising SEQ ID NO: 399 and a heavy chain comprising SEQ ID NO: 556; a light chain comprising SEQ ID NO: 400 and a heavy chain comprising SEQ ID NO: 557; a light chain comprising SEQ ID NO: 401 and a heavy chain comprising SEQ ID NO: 558; a light chain comprising SEQ ID NO: 402 and a heavy chain comprising SEQ ID NO: 559; a light chain comprising SEQ ID NO: 403 and a heavy chain comprising SEQ ID NO: 560; a light chain comprising SEQ ID NO: 404 and a heavy chain comprising SEQ ID NO: 561; a light chain comprising SEQ ID NO: 405 and a heavy chain comprising SEQ ID NO: 562; a light chain comprising SEQ ID NO: 406 and a heavy chain comprising SEQ ID NO: 563; a light chain comprising SEQ ID NO: 407 and a heavy chain comprising SEQ ID NO: 564; a light chain comprising SEQ ID NO: 408 and a heavy chain comprising SEQ ID NO: 565; a light chain comprising SEQ ID NO: 409 and a heavy chain comprising SEQ ID NO: 566; a light chain comprising SEQ ID NO: 410 and a heavy chain comprising SEQ ID NO: 567; a light chain comprising SEQ ID NO: 411 and a heavy chain comprising SEQ ID NO: 568; a light chain comprising SEQ ID NO: 412 and a heavy chain comprising SEQ ID NO: 569; a light chain comprising SEQ ID NO: 413 and a heavy chain comprising SEQ ID NO: 570; a light chain comprising SEQ ID NO: 414 and a heavy chain comprising SEQ ID NO: 571; a light chain comprising SEQ ID NO: 415 and a heavy chain comprising SEQ ID NO: 572; a light chain comprising SEQ ID NO: 416 and a heavy chain comprising SEQ ID NO: 573; a light chain comprising SEQ ID NO: 417 and a heavy chain comprising SEQ ID NO: 574; a light chain comprising SEQ ID NO: 418 and a heavy chain comprising SEQ ID NO: 575; a light chain comprising SEQ ID NO: 419 and a heavy chain comprising SEQ ID NO: 576; a light chain comprising SEQ ID NO: 420 and a heavy chain comprising SEQ ID NO: 577; a light chain comprising SEQ ID NO: 421 and a heavy chain comprising SEQ ID NO: 578; a light chain comprising SEQ ID NO: 422 and a heavy chain comprising SEQ ID NO: 579; a light chain comprising SEQ ID NO: 423 and a heavy chain comprising SEQ ID NO: 580; a light chain comprising SEQ ID NO: 424 and a heavy chain comprising SEQ ID NO: 581; a light chain comprising SEQ ID NO: 425 and a heavy chain comprising SEQ ID NO: 582; a light chain comprising SEQ ID NO: 426 and a heavy chain comprising SEQ ID NO: 583; a light chain comprising SEQ ID NO: 427 and a heavy chain comprising SEQ ID NO: 584; a light chain comprising SEQ ID NO: 428 and a heavy chain comprising SEQ ID NO: 585; a light chain comprising SEQ ID NO: 429 and a heavy chain comprising SEQ ID NO: 586; a light chain comprising SEQ ID NO: 430 and a heavy chain comprising SEQ ID NO: 587; a light chain comprising SEQ ID NO: 431 and a heavy chain comprising SEQ ID NO: 588; a light chain comprising SEQ ID NO: 432 and a heavy chain comprising SEQ ID NO: 589; a light chain comprising SEQ ID NO: 433 and a heavy chain comprising SEQ ID NO: 590; a light chain comprising SEQ ID NO: 434 and a heavy chain comprising SEQ ID NO: 591; a light chain comprising SEQ ID NO: 435 and a heavy chain comprising SEQ ID NO: 592; a light chain comprising SEQ ID NO: 436 and a heavy chain comprising SEQ ID NO: 593; a light chain comprising SEQ ID NO: 437 and a heavy chain comprising SEQ ID NO: 594; a light chain comprising SEQ ID NO: 438 and a heavy chain comprising SEQ ID NO: 595; a light chain comprising SEQ ID NO: 439 and a heavy chain comprising SEQ ID NO: 596; a light chain comprising SEQ ID NO: 440 and a heavy chain comprising SEQ ID NO: 597; a light chain comprising SEQ ID NO: 441 and a heavy chain comprising SEQ ID NO: 598; a light chain comprising SEQ ID NO: 442 and a heavy chain comprising SEQ ID NO: 599; a light chain comprising SEQ ID NO: 443 and a heavy chain comprising SEQ ID NO: 600; a light chain comprising SEQ ID NO: 444 and a heavy chain comprising SEQ ID NO: 601; a light chain comprising SEQ ID NO: 445 and a heavy chain comprising SEQ ID NO: 602; a light chain comprising SEQ ID NO: 446 and a heavy chain comprising SEQ ID NO: 603; a light chain comprising SEQ ID NO: 447 and a heavy chain comprising SEQ ID NO: 604; a light chain comprising SEQ ID NO: 448 and a heavy chain comprising SEQ ID NO: 605; a light chain comprising SEQ ID NO: 449 and a heavy chain comprising SEQ ID NO: 606; a light chain comprising SEQ ID NO: 450 and a heavy chain comprising SEQ ID NO: 607; a light chain comprising SEQ ID NO: 451 and a heavy chain comprising SEQ ID NO: 608; a light chain comprising SEQ ID NO: 452 and a heavy chain comprising SEQ ID NO: 609; a light chain comprising SEQ ID NO: 453 and a heavy chain comprising SEQ ID NO: 610; a light chain comprising SEQ ID NO: 454 and a heavy chain comprising SEQ ID NO: 611; a light chain comprising SEQ ID NO: 455 and a heavy chain comprising SEQ ID NO: 612; a light chain comprising SEQ ID NO: 456 and a heavy chain comprising SEQ ID NO: 613; a light chain comprising SEQ ID NO: 457 and a heavy chain comprising SEQ ID NO: 614; a light chain comprising SEQ ID NO: 458 and a heavy chain comprising SEQ ID NO: 615; a light chain comprising SEQ ID NO: 459 and a heavy chain comprising SEQ ID NO: 616; a light chain comprising SEQ ID NO: 460 and a heavy chain comprising SEQ ID NO: 617; a light chain comprising SEQ ID NO: 461 and a heavy chain comprising SEQ ID NO: 618; a light chain comprising SEQ ID NO: 462 and a heavy chain comprising SEQ ID NO: 619; a light chain comprising SEQ ID NO: 463 and a heavy chain comprising SEQ ID NO: 620; a light chain comprising SEQ ID NO: 464 and a heavy chain comprising SEQ ID NO: 621; a light chain comprising SEQ ID NO: 465 and a heavy chain comprising SEQ ID NO: 622; a light chain comprising SEQ ID NO: 466 and a heavy chain comprising SEQ ID NO: 623; a light chain comprising SEQ ID NO: 467 and a heavy chain comprising SEQ ID NO: 624; a light chain comprising SEQ ID NO: 468 and a heavy chain comprising SEQ ID NO: 625; a light chain comprising SEQ ID NO: 469 and a heavy chain comprising SEQ ID NO: 626; a light chain comprising SEQ ID NO: 470 and a heavy chain comprising SEQ ID NO: 627; and a light chain comprising SEQ ID NO: 471 and a heavy chain comprising SEQ ID NO: 628, wherein the antibody or functional fragment thereof comprises a cysteine or non-canonical amino acid amino acid substitution at one or more conjugation site(s) selected from the group consisting of D70 of the antibody light chain relative to reference sequence SEQ ID NO: 455, E276 of the antibody heavy chain relative to reference sequence SEQ ID NO: 612, and T363 of the antibody heavy chain relative to reference sequence SEQ ID NO: 612.

[0217] In one embodiment the antibody or fragment thereof comprises a light chain encoded by a polynucleotide sequence selected from the group consisting of SEQ ID NOs: 1885-2014 and a heavy chain comprising a sequence selected from the group consisting of SEQ ID NOs: 2042-2198, wherein the antibody or functional fragment thereof comprises a cysteine or non-canonical amino acid amino acid substitution at one or more conjugation site(s) selected from the group consisting of D70 of the antibody light chain relative to reference sequence SEQ ID NO: 455, E276 of the antibody heavy chain relative to reference sequence SEQ ID NO: 612, and T363 of the antibody heavy chain relative to reference sequence SEQ ID NO: 612. In one embodiment the antibody or fragment thereof comprises a combination of a light chain and a heavy chain, wherein the antibody or functional fragment thereof comprises a cysteine or non-canonical amino acid amino acid substitution at one or more conjugation site(s) selected from the group consisting of D70 of the antibody light chain relative to reference sequence SEQ ID NO: 455, E276 of the antibody heavy chain relative to reference sequence SEQ ID NO: 612, and T363 of the antibody heavy chain relative to reference sequence SEQ ID NO: 612, selected from the group consisting of a light chain encoded by a polynucleotide sequence comprising SEQ ID NO: 1885 and a heavy chain encoded by a polynucleotide sequence comprising SEQ ID NO: 2042; a light chain encoded by a polynucleotide sequence comprising SEQ ID NO: 1886 and a heavy chain encoded by a polynucleotide sequence comprising SEQ ID NO: 2043; a light chain encoded by a polynucleotide sequence comprising SEQ ID NO: 1887 and a heavy chain encoded by a polynucleotide sequence comprising SEQ ID NO: 2044; a light chain encoded by a polynucleotide sequence comprising SEQ ID NO: 1888 and a heavy chain encoded by a polynucleotide sequence comprising SEQ ID NO: 2045; a light chain encoded by a polynucleotide sequence comprising SEQ ID NO: 1889 and a heavy chain encoded by a polynucleotide sequence comprising SEQ ID NO: 2046; a light chain encoded by a polynucleotide sequence comprising SEQ ID NO: 1890 and a heavy chain encoded by a polynucleotide sequence comprising SEQ ID NO: 2047; a light chain encoded by a polynucleotide sequence comprising SEQ ID NO: 1891 and a heavy chain encoded by a polynucleotide sequence comprising SEQ ID NO: 2048; a light chain encoded by a polynucleotide sequence comprising SEQ ID NO: 1892 and a heavy chain encoded by a polynucleotide sequence comprising SEQ ID NO: 2049; a light chain encoded by a polynucleotide sequence comprising SEQ ID NO: 1893 and a heavy chain encoded by a polynucleotide sequence comprising SEQ ID NO: 2050; a light chain encoded by a polynucleotide sequence comprising SEQ ID NO: 1894 and a heavy chain encoded by a polynucleotide sequence comprising SEQ ID NO: 2051; a light chain encoded by a polynucleotide sequence comprising SEQ ID NO: 1895 and a heavy chain encoded by a polynucleotide sequence comprising SEQ ID NO: 2052; a light chain encoded by a polynucleotide sequence comprising SEQ ID NO: 1896 and a heavy chain encoded by a polynucleotide sequence comprising SEQ ID NO: 2053; a light chain encoded by a polynucleotide sequence comprising SEQ ID NO: 1897 and a heavy chain encoded by a polynucleotide sequence comprising SEQ ID NO: 2054; a light chain encoded by a polynucleotide sequence comprising SEQ ID NO: 1898 and a heavy chain encoded by a polynucleotide sequence comprising SEQ ID NO: 2055; a light chain encoded by a polynucleotide sequence comprising SEQ ID NO: 1899 and a heavy chain encoded by a polynucleotide sequence comprising SEQ ID NO: 2056; a light chain encoded by a polynucleotide sequence comprising SEQ ID NO: 1900 and a heavy chain encoded by a polynucleotide sequence comprising SEQ ID NO: 2057; a light chain encoded by a polynucleotide sequence comprising SEQ ID NO: 1901 and a heavy chain encoded by a polynucleotide sequence comprising SEQ ID NO: 2058; a light chain encoded by a polynucleotide sequence comprising SEQ ID NO: 1902 and a heavy chain encoded by a polynucleotide sequence comprising SEQ ID NO: 2059; a light chain encoded by a polynucleotide sequence comprising SEQ ID NO: 1903 and a heavy chain encoded by a polynucleotide sequence comprising SEQ ID NO: 2060; a light chain encoded by a polynucleotide sequence comprising SEQ ID NO: 1904 and a heavy chain encoded by a polynucleotide sequence comprising SEQ ID NO: 2061; a light chain encoded by a polynucleotide sequence comprising SEQ ID NO: 1905 and a heavy chain encoded by a polynucleotide sequence comprising SEQ ID NO: 2062; a light chain encoded by a polynucleotide sequence comprising SEQ ID NO: 1906 and a heavy chain encoded by a polynucleotide sequence comprising SEQ ID NO: 2063; a light chain encoded by a polynucleotide sequence comprising SEQ ID NO: 1907 and a heavy chain encoded by a polynucleotide sequence comprising SEQ ID NO: 2064; a light chain encoded by a polynucleotide sequence comprising SEQ ID NO: 1908 and a heavy chain encoded by a polynucleotide sequence comprising SEQ ID NO: 2065; a light chain encoded by a polynucleotide sequence comprising SEQ ID NO: 1909 and a heavy chain encoded by a polynucleotide sequence comprising SEQ ID NO: 2066; a light chain encoded by a polynucleotide sequence comprising SEQ ID NO: 1910 and a heavy chain encoded by a polynucleotide sequence comprising SEQ ID NO: 2067; a light chain encoded by a polynucleotide sequence comprising SEQ ID NO: 1911 and a heavy chain encoded by a polynucleotide sequence comprising SEQ ID NO: 2068; a light chain encoded by a polynucleotide sequence comprising SEQ ID NO: 1912 and a heavy chain encoded by a polynucleotide sequence comprising SEQ ID NO: 2069; a light chain encoded by a polynucleotide sequence comprising SEQ ID NO: 1913 and a heavy chain encoded by a polynucleotide sequence comprising SEQ ID NO: 2070; a light chain encoded by a polynucleotide sequence comprising SEQ ID NO: 1914 and a heavy chain encoded by a polynucleotide sequence comprising SEQ ID NO: 2071; a light chain encoded by a polynucleotide sequence comprising SEQ ID NO: 1915 and a heavy chain encoded by a polynucleotide sequence comprising SEQ ID NO: 2072; a light chain encoded by a polynucleotide sequence comprising SEQ ID NO: 1916 and a heavy chain encoded by a polynucleotide sequence comprising SEQ ID NO: 2073; a light chain encoded by a polynucleotide sequence comprising SEQ ID NO: 1917 and a heavy chain encoded by a polynucleotide sequence comprising SEQ ID NO: 2074; a light chain encoded by a polynucleotide sequence comprising SEQ ID NO: 1918 and a heavy chain encoded by a polynucleotide sequence comprising SEQ ID NO: 2075; a light chain encoded by a polynucleotide sequence comprising SEQ ID NO: 1919 and a heavy chain encoded by a polynucleotide sequence comprising SEQ ID NO: 2076; a light chain encoded by a polynucleotide sequence comprising SEQ ID NO: 1920 and a heavy chain encoded by a polynucleotide sequence comprising SEQ ID NO: 2077; a light chain encoded by a polynucleotide sequence comprising SEQ ID NO: 1921 and a heavy chain encoded by a polynucleotide sequence comprising SEQ ID NO: 2078; a light chain encoded by a polynucleotide sequence comprising SEQ ID NO: 1922 and a heavy chain encoded by a polynucleotide sequence comprising SEQ ID NO: 2079; a light chain encoded by a polynucleotide sequence comprising SEQ ID NO: 1923 and a heavy chain encoded by a polynucleotide sequence comprising SEQ ID NO: 2080; a light chain encoded by a polynucleotide sequence comprising SEQ ID NO: 1924 and a heavy chain encoded by a polynucleotide sequence comprising SEQ ID NO: 2081; a light chain encoded by a polynucleotide sequence comprising SEQ ID NO: 1925 and a heavy chain encoded by a polynucleotide sequence comprising SEQ ID NO: 2082; a light chain encoded by a polynucleotide sequence comprising SEQ ID NO: 1926 and a heavy chain encoded by a polynucleotide sequence comprising SEQ ID NO: 2083; a light chain encoded by a polynucleotide sequence comprising SEQ ID NO: 1927 and a heavy chain encoded by a polynucleotide sequence comprising SEQ ID NO: 2084; a light chain encoded by a polynucleotide sequence comprising SEQ ID NO: 1928 and a heavy chain encoded by a polynucleotide sequence comprising SEQ ID NO: 2085; a light chain encoded by a polynucleotide sequence comprising SEQ ID NO: 1929 and a heavy chain encoded by a polynucleotide sequence comprising SEQ ID NO: 2086; a light chain encoded by a polynucleotide sequence comprising SEQ ID NO: 1930 and a heavy chain encoded by a polynucleotide sequence comprising SEQ ID NO: 2087; a light chain encoded by a polynucleotide sequence comprising SEQ ID NO: 1931 and a heavy chain encoded by a polynucleotide sequence comprising SEQ ID NO: 2088; a light chain encoded by a polynucleotide sequence comprising SEQ ID NO: 1932 and a heavy chain encoded by a polynucleotide sequence comprising SEQ ID NO: 2089; a light chain encoded by a polynucleotide sequence comprising SEQ ID NO: 1933 and a heavy chain encoded by a polynucleotide sequence comprising SEQ ID NO: 2090; a light chain encoded by a polynucleotide sequence comprising SEQ ID NO: 1934 and a heavy chain encoded by a polynucleotide sequence comprising SEQ ID NO: 2091; a light chain encoded by a polynucleotide sequence comprising SEQ ID NO: 1935 and a heavy chain encoded by a polynucleotide sequence comprising SEQ ID NO: 2092; a light chain encoded by a polynucleotide sequence comprising SEQ ID NO: 1936 and a heavy chain encoded by a polynucleotide sequence comprising SEQ ID NO: 2093; a light chain encoded by a polynucleotide sequence comprising SEQ ID NO: 1937 and a heavy chain encoded by a polynucleotide sequence comprising SEQ ID NO: 2094; a light chain encoded by a polynucleotide sequence comprising SEQ ID NO: 1938 and a heavy chain encoded by a polynucleotide sequence comprising SEQ ID NO: 2095; a light chain encoded by a polynucleotide sequence comprising SEQ ID NO: 1939 and a heavy chain encoded by a polynucleotide sequence comprising SEQ ID NO: 2096; a light chain encoded by a polynucleotide sequence comprising SEQ ID NO: 1940 and a heavy chain encoded by a polynucleotide sequence comprising SEQ ID NO: 2097; a light chain encoded by a polynucleotide sequence comprising SEQ ID NO: 1941 and a heavy chain encoded by a polynucleotide sequence comprising SEQ ID NO: 2098; a light chain encoded by a polynucleotide sequence comprising SEQ ID NO: 1942 and a heavy chain encoded by a polynucleotide sequence comprising SEQ ID NO: 2099; a light chain encoded by a polynucleotide sequence comprising SEQ ID NO: 1943 and a heavy chain encoded by a polynucleotide sequence comprising SEQ ID NO: 2100; a light chain encoded by a polynucleotide sequence comprising SEQ ID NO: 1944 and a heavy chain encoded by a polynucleotide sequence comprising SEQ ID NO: 2101; a light chain encoded by a polynucleotide sequence comprising SEQ ID NO: 1945 and a heavy chain encoded by a polynucleotide sequence comprising SEQ ID NO: 2102; a light chain encoded by a polynucleotide sequence comprising SEQ ID NO: 1946 and a heavy chain encoded by a polynucleotide sequence comprising SEQ ID NO: 2103; a light chain encoded by a polynucleotide sequence comprising SEQ ID NO: 1947 and a heavy chain encoded by a polynucleotide sequence comprising SEQ ID NO: 2104; a light chain encoded by a polynucleotide sequence comprising SEQ ID NO: 1948 and a heavy chain encoded by a polynucleotide sequence comprising SEQ ID NO: 2105; a light chain encoded by a polynucleotide sequence comprising SEQ ID NO: 1949 and a heavy chain encoded by a polynucleotide sequence comprising SEQ ID NO: 2106; a light chain encoded by a polynucleotide sequence comprising SEQ ID NO: 1950 and a heavy chain encoded by a polynucleotide sequence comprising SEQ ID NO: 2107; a light chain encoded by a polynucleotide sequence comprising SEQ ID NO: 1951 and a heavy chain encoded by a polynucleotide sequence comprising SEQ ID NO: 2108; a light chain encoded by a polynucleotide sequence comprising SEQ ID NO: 1952 and a heavy chain encoded by a polynucleotide sequence comprising SEQ ID NO: 2109; a light chain encoded by a polynucleotide sequence comprising SEQ ID NO: 1953 and a heavy chain encoded by a polynucleotide sequence comprising SEQ ID NO: 2110; a light chain encoded by a polynucleotide sequence comprising SEQ ID NO: 1954 and a heavy chain encoded by a polynucleotide sequence comprising SEQ ID NO: 2111; a light chain encoded by a polynucleotide sequence comprising SEQ ID NO: 1955 and a heavy chain encoded by a polynucleotide sequence comprising SEQ ID NO: 2112; a light chain encoded by a polynucleotide sequence comprising SEQ ID NO: 1956 and a heavy chain encoded by a polynucleotide sequence comprising SEQ ID NO: 2113; a light chain encoded by a polynucleotide sequence comprising SEQ ID NO: 1957 and a heavy chain encoded by a polynucleotide sequence comprising SEQ ID NO: 2114; a light chain encoded by a polynucleotide sequence comprising SEQ ID NO: 1958 and a heavy chain encoded by a polynucleotide sequence comprising SEQ ID NO: 2115; a light chain encoded by a polynucleotide sequence comprising SEQ ID NO: 1959 and a heavy chain encoded by a polynucleotide sequence comprising SEQ ID NO: 2116; a light chain encoded by a polynucleotide sequence comprising SEQ ID NO: 1960 and a heavy chain encoded by a polynucleotide sequence comprising SEQ ID NO: 2117; a light chain encoded by a polynucleotide sequence comprising SEQ ID NO: 1961 and a heavy chain encoded by a polynucleotide sequence comprising SEQ ID NO: 2118; a light chain encoded by a polynucleotide sequence comprising SEQ ID NO: 1962 and a heavy chain encoded by a polynucleotide sequence comprising SEQ ID NO: 2119; a light chain encoded by a polynucleotide sequence comprising SEQ ID NO: 1963 and a heavy chain encoded by a polynucleotide sequence comprising SEQ ID NO: 2120; a light chain encoded by a polynucleotide sequence comprising SEQ ID NO: 1964 and a heavy chain encoded by a polynucleotide sequence comprising SEQ ID NO: 2121; a light chain encoded by a polynucleotide sequence comprising SEQ ID NO: 1965 and a heavy chain encoded by a polynucleotide sequence comprising SEQ ID NO: 2122; a light chain encoded by a polynucleotide sequence comprising SEQ ID NO: 1966 and a heavy chain encoded by a polynucleotide sequence comprising SEQ ID NO: 2123; a light chain encoded by a polynucleotide sequence comprising SEQ ID NO: 1967 and a heavy chain encoded by a polynucleotide sequence comprising SEQ ID NO: 2124; a light chain encoded by a polynucleotide sequence comprising SEQ ID NO: 1968 and a heavy chain encoded by a polynucleotide sequence comprising SEQ ID NO: 2125; a light chain encoded by a polynucleotide sequence comprising SEQ ID NO: 1969 and a heavy chain encoded by a polynucleotide sequence comprising SEQ ID NO: 2126; a light chain encoded by a polynucleotide sequence comprising SEQ ID NO: 1970 and a heavy chain encoded by a polynucleotide sequence comprising SEQ ID NO: 2127; a light chain encoded by a polynucleotide sequence comprising SEQ ID NO: 1971 and a heavy chain encoded by a polynucleotide sequence comprising SEQ ID NO: 2128; a light chain encoded by a polynucleotide sequence comprising SEQ ID NO: 1972 and a heavy chain encoded by a polynucleotide sequence comprising SEQ ID NO: 2129; a light chain encoded by a polynucleotide sequence comprising SEQ ID NO: 1973 and a heavy chain encoded by a polynucleotide sequence comprising SEQ ID NO: 2130; a light chain encoded by a polynucleotide sequence comprising SEQ ID NO: 1974 and a heavy chain encoded by a polynucleotide sequence comprising SEQ ID NO: 2131; a light chain encoded by a polynucleotide sequence comprising SEQ ID NO: 1975 and a heavy chain encoded by a polynucleotide sequence comprising SEQ ID NO: 2132; a light chain encoded by a polynucleotide sequence comprising SEQ ID NO: 1976 and a heavy chain encoded by a polynucleotide sequence comprising SEQ ID NO: 2133; a light chain encoded by a polynucleotide sequence comprising SEQ ID NO: 1977 and a heavy chain encoded by a polynucleotide sequence comprising SEQ ID NO: 2134; a light chain encoded by a polynucleotide sequence comprising SEQ ID NO: 1978 and a heavy chain encoded by a polynucleotide sequence comprising SEQ ID NO: 2135; a light chain encoded by a polynucleotide sequence comprising SEQ ID NO: 1979 and a heavy chain encoded by a polynucleotide sequence comprising SEQ ID NO: 2136; a light chain encoded by a polynucleotide sequence comprising SEQ ID NO: 1980 and a heavy chain encoded by a polynucleotide sequence comprising SEQ ID NO: 2137; a light chain encoded by a polynucleotide sequence comprising SEQ ID NO: 1981 and a heavy chain encoded by a polynucleotide sequence comprising SEQ ID NO: 2138; a light chain encoded by a polynucleotide sequence comprising SEQ ID NO: 1982 and a heavy chain encoded by a polynucleotide sequence comprising SEQ ID NO: 2139; a light chain encoded by a polynucleotide sequence comprising SEQ ID NO: 1983 and a heavy chain encoded by a polynucleotide sequence comprising SEQ ID NO: 2140; a light chain encoded by a polynucleotide sequence comprising SEQ ID NO: 1984 and a heavy chain encoded by a polynucleotide sequence comprising SEQ ID NO: 2141; a light chain encoded by a polynucleotide sequence comprising SEQ ID NO: 1985 and a heavy chain encoded by a polynucleotide sequence comprising SEQ ID NO: 2142; a light chain encoded by a polynucleotide sequence comprising SEQ ID NO: 1986 and a heavy chain encoded by a polynucleotide sequence comprising SEQ ID NO: 2143; a light chain encoded by a polynucleotide sequence comprising SEQ ID NO: 1987 and a heavy chain encoded by a polynucleotide sequence comprising SEQ ID NO: 2144; a light chain encoded by a polynucleotide sequence comprising SEQ ID NO: 1988 and a heavy chain encoded by a polynucleotide sequence comprising SEQ ID NO: 2145; a light chain encoded by a polynucleotide sequence comprising SEQ ID NO: 1989 and a heavy chain encoded by a polynucleotide sequence comprising SEQ ID NO: 2146; a light chain encoded by a polynucleotide sequence comprising SEQ ID NO: 1990 and a heavy chain encoded by a polynucleotide sequence comprising SEQ ID NO: 2147; a light chain encoded by a polynucleotide sequence comprising SEQ ID NO: 1991 and a heavy chain encoded by a polynucleotide sequence comprising SEQ ID NO: 2148; a light chain encoded by a polynucleotide sequence comprising SEQ ID NO: 1992 and a heavy chain encoded by a polynucleotide sequence comprising SEQ ID NO: 2149; a light chain encoded by a polynucleotide sequence comprising SEQ ID NO: 1993 and a heavy chain encoded by a polynucleotide sequence comprising SEQ ID NO: 2150; a light chain encoded by a polynucleotide sequence comprising SEQ ID NO: 1994 and a heavy chain encoded by a polynucleotide sequence comprising SEQ ID NO: 2151; a light chain encoded by a polynucleotide sequence comprising SEQ ID NO: 1995 and a heavy chain encoded by a polynucleotide sequence comprising SEQ ID NO: 2152; a light chain encoded by a polynucleotide sequence comprising SEQ ID NO: 1996 and a heavy chain encoded by a polynucleotide sequence comprising SEQ ID NO: 2153; a light chain encoded by a polynucleotide sequence comprising SEQ ID NO: 1997 and a heavy chain encoded by a polynucleotide sequence comprising SEQ ID NO: 2154; a light chain encoded by a polynucleotide sequence comprising SEQ ID NO: 1998 and a heavy chain encoded by a polynucleotide sequence comprising SEQ ID NO: 2155; a light chain encoded by a polynucleotide sequence comprising SEQ ID NO: 1999 and a heavy chain encoded by a polynucleotide sequence comprising SEQ ID NO: 2156; a light chain encoded by a polynucleotide sequence comprising SEQ ID NO: 2000 and a heavy chain encoded by a polynucleotide sequence comprising SEQ ID NO: 2157; a light chain encoded by a polynucleotide sequence comprising SEQ ID NO: 2001 and a heavy chain encoded by a polynucleotide sequence comprising SEQ ID NO: 2158; a light chain encoded by a polynucleotide sequence comprising SEQ ID NO: 2002 and a heavy chain encoded by a polynucleotide sequence comprising SEQ ID NO: 2159; a light chain encoded by a polynucleotide sequence comprising SEQ ID NO: 2003 and a heavy chain encoded by a polynucleotide sequence comprising SEQ ID NO: 2160; a light chain encoded by a polynucleotide sequence comprising SEQ ID NO: 2004 and a heavy chain encoded by a polynucleotide sequence comprising SEQ ID NO: 2161; a light chain encoded by a polynucleotide sequence comprising SEQ ID NO: 2005 and a heavy chain encoded by a polynucleotide sequence comprising SEQ ID NO: 2162; a light chain encoded by a polynucleotide sequence comprising SEQ ID NO: 2006 and a heavy chain encoded by a polynucleotide sequence comprising SEQ ID NO: 2163; a light chain encoded by a polynucleotide sequence comprising SEQ ID NO: 2007 and a heavy chain encoded by a polynucleotide sequence comprising SEQ ID NO: 2164; a light chain encoded by a polynucleotide sequence comprising SEQ ID NO: 2008 and a heavy chain encoded by a polynucleotide sequence comprising SEQ ID NO: 2165; a light chain encoded by a polynucleotide sequence comprising SEQ ID NO: 2009 and a heavy chain encoded by a polynucleotide sequence comprising SEQ ID NO: 2166; a light chain encoded by a polynucleotide sequence comprising SEQ ID NO: 2010 and a heavy chain encoded by a polynucleotide sequence comprising SEQ ID NO: 2167; a light chain encoded by a polynucleotide sequence comprising SEQ ID NO: 2011 and a heavy chain encoded by a polynucleotide sequence comprising SEQ ID NO: 2168; a light chain encoded by a polynucleotide sequence comprising SEQ ID NO: 2012 and a heavy chain encoded by a polynucleotide sequence comprising SEQ ID NO: 2169; a light chain encoded by a polynucleotide sequence comprising SEQ ID NO: 2013 and a heavy chain encoded by a polynucleotide sequence comprising SEQ ID NO: 2170; a light chain encoded by a polynucleotide sequence comprising SEQ ID NO: 2014 and a heavy chain encoded by a polynucleotide sequence comprising SEQ ID NO: 2171; a light chain encoded by a polynucleotide sequence comprising SEQ ID NO: 2015 and a heavy chain encoded by a polynucleotide sequence comprising SEQ ID NO: 2172; a light chain encoded by a polynucleotide sequence comprising SEQ ID NO: 2016 and a heavy chain encoded by a polynucleotide sequence comprising SEQ ID NO: 2173; a light chain encoded by a polynucleotide sequence comprising SEQ ID NO: 2017 and a heavy chain encoded by a polynucleotide sequence comprising SEQ ID NO: 2174; a light chain encoded by a polynucleotide sequence comprising SEQ ID NO: 2018 and a heavy chain encoded by a polynucleotide sequence comprising SEQ ID NO: 2175; a light chain encoded by a polynucleotide sequence comprising SEQ ID NO: 2019 and a heavy chain encoded by a polynucleotide sequence comprising SEQ ID NO: 2176; a light chain encoded by a polynucleotide sequence comprising SEQ ID NO: 2020 and a heavy chain encoded by a polynucleotide sequence comprising SEQ ID NO: 2177; a light chain encoded by a polynucleotide sequence comprising SEQ ID NO: 2021 and a heavy chain encoded by a polynucleotide sequence comprising SEQ ID NO: 2178; a light chain encoded by a polynucleotide sequence comprising SEQ ID NO: 2022 and a heavy chain encoded by a polynucleotide sequence comprising SEQ ID NO: 2179; a light chain encoded by a polynucleotide sequence comprising SEQ ID NO: 2023 and a heavy chain encoded by a polynucleotide sequence comprising SEQ ID NO: 2180; a light chain encoded by a polynucleotide sequence comprising SEQ ID NO: 2024 and a heavy chain encoded by a polynucleotide sequence comprising SEQ ID NO: 2181; a light chain encoded by a polynucleotide sequence comprising SEQ ID NO: 2025 and a heavy chain encoded by a polynucleotide sequence comprising SEQ ID NO: 2182; a light chain encoded by a polynucleotide sequence comprising SEQ ID NO: 2026 and a heavy chain encoded by a polynucleotide sequence comprising SEQ ID NO: 2183; a light chain encoded by a polynucleotide sequence comprising SEQ ID NO: 2027 and a heavy chain encoded by a polynucleotide sequence comprising SEQ ID NO: 2184; a light chain encoded by a polynucleotide sequence comprising SEQ ID NO: 2028 and a heavy chain encoded by a polynucleotide sequence comprising SEQ ID NO: 2185; a light chain encoded by a polynucleotide sequence comprising SEQ ID NO: 2029 and a heavy chain encoded by a polynucleotide sequence comprising SEQ ID NO: 2186; a light chain encoded by a polynucleotide sequence comprising SEQ ID NO: 2030 and a heavy chain encoded by a polynucleotide sequence comprising SEQ ID NO: 2187; a light chain encoded by a polynucleotide sequence comprising SEQ ID NO: 2031 and a heavy chain encoded by a polynucleotide sequence comprising SEQ ID NO: 2188; a light chain encoded by a polynucleotide sequence comprising SEQ ID NO: 2032 and a heavy chain encoded by a polynucleotide sequence comprising SEQ ID NO: 2189; a light chain encoded by a polynucleotide sequence comprising SEQ ID NO: 2033 and a heavy chain encoded by a polynucleotide sequence comprising SEQ ID NO: 2190; a light chain encoded by a polynucleotide sequence comprising SEQ ID NO: 2034 and a heavy chain encoded by a polynucleotide sequence comprising SEQ ID NO: 2191; a light chain encoded by a polynucleotide sequence comprising SEQ ID NO: 2035 and a heavy chain encoded by a polynucleotide sequence comprising SEQ ID NO: 2192; a light chain encoded by a polynucleotide sequence comprising SEQ ID NO: 2036 and a heavy chain encoded by a polynucleotide sequence comprising SEQ ID NO: 2193; a light chain encoded by a polynucleotide sequence comprising SEQ ID NO: 2037 and a heavy chain encoded by a polynucleotide sequence comprising SEQ ID NO: 2194; a light chain encoded by a polynucleotide sequence comprising SEQ ID NO: 2038 and a heavy chain encoded by a polynucleotide sequence comprising SEQ ID NO: 2195; a light chain encoded by a polynucleotide sequence comprising SEQ ID NO: 2039 and a heavy chain encoded by a polynucleotide sequence comprising SEQ ID NO: 2196; a light chain encoded by a polynucleotide sequence comprising SEQ ID NO: 2040 and a heavy chain encoded by a polynucleotide sequence comprising SEQ ID NO: 2197; and a light chain encoded by a polynucleotide sequence comprising SEQ ID NO: 2041 and a heavy chain encoded by a polynucleotide sequence comprising SEQ ID NO: 2198.

[0218] In another aspect, the antigen binding protein comprises a full length light chain and a full length heavy chain as listed in one of the rows for one of the antibodies listed in TABLE 5. Some antigen binding proteins that are provided comprise a full length light chain and a full length heavy chain as listed in one of the rows for one of the antibodies listed in TABLE 5, except that one or both of the chains differs from the sequence specified in the table at only 1, 2, 3, 4, 5, 6, 7, 8, 9, 10, 11, 12, 13, 14 or 15 amino acid residues, wherein each such sequence difference is independently either a single amino acid deletion, insertion or substitution, with the deletions, insertions and/or substitutions resulting in no more than 1, 2, 3, 4, 5, 6, 7, 8, 9, 10, 11, 12, 13, 14 or 15 amino acid changes relative to the full length sequences specified in TABLE 5. In one embodiment the antigen binding protein comprises a full length light chain and/or a full length heavy chain from Table 5 with the N-terminal methionine deleted. In one embodiment the antigen binding protein comprises a full length light chain and/or a full length heavy chain from Table 5 with the C-terminal lysine deleted. Other antigen binding proteins also comprise a full length light chain and a full length heavy chain as listed in one of the rows for one of the antibodies listed in TABLE 5, except that one or both of the chains differs from the sequence specified in the table in that the light chain and/or heavy chain comprises or consists of a sequence of amino acids that has at least 70%, 75%, 80%, 85%, 90%, 95%, 96%, 97%, 98%, or 99% sequence identity to the amino acid sequences of the light chain or heavy chain sequences as specified in TABLE 5.

[0219] In another embodiment, the antigen binding protein consists of a just a light or a heavy chain polypeptide as set forth in TABLE 5.

[0220] In still another aspect, antigen-binding proteins containing the CDRs, variable domains and/or full length sequences listed in TABLES 3, 4A, 4B, and 5 is a monoclonal antibody, a chimeric antibody, a humanized antibody, a human antibody, a multispecific antibody, or an antibody fragment of the foregoing. In another embodiment, the antibody fragment of the isolated antigen-binding proteins provided herein is a Fab fragment, a Fab′ fragment, an F(ab′)₂ fragment, an Fv fragment, a diabody, or a scFv based upon an antibody with the sequences as listed in TABLE 5.

[0221] In yet another aspect, the isolated antigen-binding protein provided in TABLE 5 can be coupled to a labeling group and can compete for binding to GIPR with an antigen binding protein of one of the isolated antigen-binding proteins provided herein.

[0222] In another embodiment, antigen binding proteins are provided that compete with one of the exemplified antibodies or functional fragments described above for specific binding to a human GIPR (e.g., SEQ ID NO: 3141). Such antigen binding proteins may bind to the same epitope as one of the antigen binding proteins described herein, or to an overlapping epitope. Antigen binding proteins and fragments that compete with the exemplified antigen binding proteins are expected to show similar functional properties. The exemplified antigen binding proteins and fragments include those described above, including those with heavy and light chains, variable region domains and CDRs included in TABLES 3, 4A, 4B, and 5. Thus, as a specific example, the antigen binding proteins that are provided include those that compete with an antibody having:
[0223] all 6 of the CDRs listed for any antibody listed in TABLES 4A and 4B;
[0224] a VH and a VL listed for any antibody listed in TABLE 3; or
[0225] two light chains and two heavy chains as specified for any antibody listed in TABLE 5.

[0226] The antigen binding proteins that are provided include monoclonal antibodies that bind to GIPR. Monoclonal antibodies may be produced using any technique known in the art, e.g., by immortalizing spleen cells harvested from the transgenic animal after completion of the immunization schedule. The spleen cells can be immortalized using any technique known in the art, e.g., by fusing them with myeloma cells to produce hybridomas. Myeloma cells for use in hybridoma-producing fusion procedures preferably are non-antibody-producing, have high fusion efficiency, and enzyme deficiencies that render them incapable of growing in certain selective media which support the growth of only the desired fused cells (hybridomas). Examples of suitable cell lines for use in mouse fusions include Sp-20, P3-X63/Ag8, P3-X63-Ag8.653, NS1/1.Ag 4 1, Sp210-Ag14, FO, NSO/U, MPC-11, MPC11-X45-GTG 1.7 and S194/5XXO Bul; examples of cell lines used in rat fusions include R210.RCY3, Y3-Ag 1.2.3, IR983F and 4B210. Other cell lines useful for cell fusions are U-266, GM1500-GRG2, LICR-LON-HMy2 and UC729-6.

[0227] In some instances, a hybridoma cell line is produced by immunizing an animal (e.g., a transgenic animal having human immunoglobulin sequences) with a GIPR immunogen; harvesting spleen cells from the immunized animal; fusing the harvested spleen cells to a myeloma cell line, thereby generating hybridoma cells; establishing hybridoma cell lines from the hybridoma cells, and identifying a hybridoma cell line that produces an antibody that binds a GIPR polypeptide. Such hybridoma cell lines, and anti-GIPR monoclonal antibodies produced by them, are aspects of the present application.

[0228] Monoclonal antibodies secreted by a hybridoma cell line can be purified using any technique known in the art. Hybridomas or mAbs may be further screened to identify mAbs with particular properties, such as the ability to increase GIPR activity.

[0229] Chimeric and humanized antibodies based upon the foregoing sequences are also provided. Monoclonal antibodies for use as therapeutic agents may be modified in various ways prior to use. One example is a chimeric antibody, which is an antibody composed of protein segments from different antibodies that are covalently joined to produce functional immunoglobulin light or heavy chains or immunologically functional portions thereof. Generally, a portion of the heavy chain and/or light chain is identical with or homologous to a corresponding sequence in antibodies derived from a particular species or belonging to a particular antibody class or subclass, while the remainder of the chain(s) is/are identical with or homologous to a corresponding sequence in antibodies derived from another species or belonging to another antibody class or subclass. For methods relating to chimeric antibodies, see, for example, U.S. Pat. No. 4,816,567; and Morrison et al., 1985, Proc. Natl. Acad. Sci. USA 81:6851-6855, which are hereby incorporated by reference. CDR grafting is described, for example, in U.S. Pat. Nos. 6,180,370, 5,693,762, 5,693,761, 5,585,089, and 5,530,101.

[0230] Generally, the goal of making a chimeric antibody is to create a chimera in which the number of amino acids from the intended patient species is maximized. One example is the “CDR-grafted” antibody, in which the antibody comprises one or more complementarity determining regions (CDRs) from a particular species or belonging to a particular antibody class or subclass, while the remainder of the antibody chain(s) is/are identical with or homologous to a corresponding sequence in antibodies derived from another species or belonging to another antibody class or subclass. For use in humans, the variable region or selected CDRs from a rodent antibody often are grafted into a human antibody, replacing the naturally-occurring variable regions or CDRs of the human antibody.

[0231] One useful type of chimeric antibody is a “humanized” antibody. Generally, a humanized antibody is produced from a monoclonal antibody raised initially in a non-human animal. Certain amino acid residues in this monoclonal antibody, typically from non-antigen recognizing portions of the antibody, are modified to be homologous to corresponding residues in a human antibody of corresponding isotype. Humanization can be performed, for example, using various methods by substituting at least a portion of a rodent variable region for the corresponding regions of a human antibody (see, e.g., U.S. Pat. Nos. 5,585,089, and 5,693,762; Jones et al., 1986, Nature 321:522-525; Riechmann et al., 1988, Nature 332:323-27; Verhoeyen et al., 1988, Science 239:1534-1536).

[0232] In one aspect, the CDRs of the light and heavy chain variable regions of the antibodies provided herein are grafted to framework regions (FRs) from antibodies from the same, or a different, phylogenetic species. For example, the CDRs of the heavy and light chain variable regions V_{H}1, V_{H}2, V_{H}3, V_{H}4, V_{H}5, V_{H}6, V_{H}7, V_{H}8, V_{H}9, V_{H}10, V_{H}11, V_{H}12 and/or V_{L}1, and V_{L}2 can be grafted to consensus human FRs. To create consensus human FRs, FRs from several human heavy chain or light chain amino acid sequences may be aligned to identify a consensus amino acid sequence. In other embodiments, the FRs of a heavy chain or light chain disclosed herein are replaced with the FRs from a different heavy chain or light chain. In one aspect, rare amino acids in the FRs of the heavy and light chains of GIPR antibodies are not replaced, while the rest of the FR amino acids are replaced. A “rare amino acid” is a specific amino acid that is in a position in which this particular amino acid is not usually found in an FR. Alternatively, the grafted variable regions from the one heavy or light chain may be used with a constant region that is different from the constant region of that particular heavy or light chain as disclosed herein. In other embodiments, the grafted variable regions are part of a single chain Fv antibody.

[0233] In certain embodiments, constant regions from species other than human can be used along with the human variable region(s) to produce hybrid antibodies.

[0234] Fully human GIPR antibodies are also provided. Methods are available for making fully human antibodies specific for a given antigen without exposing human beings to the antigen (“fully human antibodies”). One specific means provided for implementing the production of fully human antibodies is the “humanization” of the mouse humoral immune system. Introduction of human immunoglobulin (Ig) loci into mice in which the endogenous Ig genes have been inactivated is one means of producing fully human monoclonal antibodies (mAbs) in mouse, an animal that can be immunized with any desirable antigen. Using fully human antibodies can minimize the immunogenic and allergic responses that can sometimes be caused by administering mouse or mouse-derived mAbs to humans as therapeutic agents.

[0235] Fully human antibodies can be produced by immunizing transgenic animals (usually mice) that are capable of producing a repertoire of human antibodies in the absence of endogenous immunoglobulin production. Antigens for this purpose typically have six or more contiguous amino acids, and optionally are conjugated to a carrier, such as a hapten. See, e.g., Jakobovits et al., 1993, Proc. Natl. Acad. Sci. USA 90:2551-2555; Jakobovits et al., 1993, Nature 362:255-258; and Bruggermann et al., 1993, Year in Immunol. 7:33. In one example of such a method, transgenic animals are produced by incapacitating the endogenous mouse immunoglobulin loci encoding the mouse heavy and light immunoglobulin chains therein, and inserting into the mouse genome large fragments of human genome DNA containing loci that encode human heavy and light chain proteins. Partially modified animals, which have less than the full complement of human immunoglobulin loci, are then cross-bred to obtain an animal having all of the desired immune system modifications. When administered an immunogen, these transgenic animals produce antibodies that are immunospecific for the immunogen but have human rather than murine amino acid sequences, including the variable regions. For further details of such methods, see, for example, WO96/33735 and WO94/02602. Additional methods relating to transgenic mice for making human antibodies are described in U.S. Pat. Nos. 5,545,807; 6,713,610; 6,673,986; 6,162,963; 5,545,807; 6,300,129; 6,255,458; 5,877,397; 5,874,299 and 5,545,806; in PCT publications WO91/10741, WO90/04036, and in EP 546073B1 and EP 546073A1.

[0236] The transgenic mice described above, referred to herein as “HuMab” mice, contain a human immunoglobulin gene minilocus that encodes unrearranged human heavy ([mu] and [gamma]) and [kappa] light chain immunoglobulin sequences, together with targeted mutations that inactivate the endogenous [mu] and [kappa] chain loci (Lonberg et al., 1994, Nature 368:856-859). Accordingly, the mice exhibit reduced expression of mouse IgM or [kappa] and in response to immunization, and the introduced human heavy and light chain transgenes undergo class switching and somatic mutation to generate high affinity human IgG [kappa] monoclonal antibodies (Lonberg et al., supra.; Lonberg and Huszar, 1995, Intern. Rev. Immunol. 13: 65-93; Harding and Lonberg, 1995, Ann. N.Y. Acad. Sci. 764:536-546). The preparation of HuMab mice is described in detail in Taylor et al., 1992, Nucleic Acids Research 20:6287-6295; Chen et al., 1993, International Immunology 5:647-656; Tuaillon et al., 1994, J. Immunol. 152:2912-2920; Lonberg et al., 1994, Nature 368:856-859; Lonberg, 1994, Handbook of Exp. Pharmacology 113:49-101; Taylor et al., 1994, International Immunology 6:579-591; Lonberg and Huszar, 1995, Intern. Rev. Immunol. 13:65-93; Harding and Lonberg, 1995, Ann. N.Y. Acad. Sci. 764:536-546; Fishwild et al., 1996, Nature Biotechnology 14:845-851; the foregoing references are hereby incorporated by reference in their entirety for all purposes. See, further U.S. Pat. Nos. 5,545,806; 5,569,825; 5,625,126; 5,633,425; 5,789,650; 5,877,397; 5,661,016; 5,814,318; 5,874,299; and 5,770,429; as well as U.S. Pat. No. 5,545,807; International Publication Nos. WO 93/1227; WO 92/22646; and WO 92/03918, the disclosures of all of which are hereby incorporated by reference in their entirety for all purposes. Technologies utilized for producing human antibodies in these transgenic mice are disclosed also in WO 98/24893, and Mendez et al., 1997, Nature Genetics 15:146-156, which are hereby incorporated by reference. For example, the HCo7 and HCo12 transgenic mice strains can be used to generate human monoclonal antibodies against GIPR. Further details regarding the production of human antibodies using transgenic mice are provided below.

[0237] Using hybridoma technology, antigen-specific human mAbs with the desired specificity can be produced and selected from the transgenic mice such as those described above. Such antibodies may be cloned and expressed using a suitable vector and host cell, or the antibodies can be harvested from cultured hybridoma cells.

[0238] Fully human antibodies can also be derived from phage-display libraries (as disclosed in Hoogenboom et al., 1991, J Mol. Biol. 227:381; and Marks et al., 1991, J Mol. Biol. 222:581). Phage display techniques mimic immune selection through the display of antibody repertoires on the surface of filamentous bacteriophage, and subsequent selection of phage by their binding to an antigen of choice. One such technique is described in PCT Publication No. WO 99/10494 (hereby incorporated by reference).

[0239] The GIPR binding protein can also be a variant, mimetic, derivative or oligomer based upon the structure of GIPR antigen binding proteins have the CDRs, variable regions and/or full length chains as described above.

[0240] In one embodiment, for instance, an antigen binding protein is a variant form of the antigen binding proteins disclosed above. For instance, some of the antigen binding proteins have one or more conservative amino acid substitutions in one or more of the heavy or light chains, variable regions or CDRs.

[0241] Naturally-occurring amino acids may be divided into classes based on common side chain properties:
[0242] 1) hydrophobic: norleucine, Met, Ala, Val, Leu, Ile;
[0243] 2) neutral hydrophilic: Cys, Ser, Thr, Asn, Gln;
[0244] 3) acidic: Asp, Glu;
[0245] 4) basic: His, Lys, Arg;
[0246] 5) residues that influence chain orientation: Gly, Pro; and
[0247] 6) aromatic: Trp, Tyr, Phe.

[0248] Conservative amino acid substitutions may involve exchange of a member of one of these classes with another member of the same class. Conservative amino acid substitutions may encompass non-naturally occurring amino acid residues, which are typically incorporated by chemical peptide synthesis rather than by synthesis in biological systems. These include peptidomimetics and other reversed or inverted forms of amino acid moieties.

[0249] Non-conservative substitutions may involve the exchange of a member of one of the above classes for a member from another class. Such substituted residues may be introduced into regions of the antibody that are homologous with human antibodies, or into the non-homologous regions of the molecule.

[0250] In making such changes, according to certain embodiments, the hydropathic index of amino acids may be considered. The hydropathic profile of a protein is calculated by assigning each amino acid a numerical value (“hydropathy index”) and then repetitively averaging these values along the peptide chain. Each amino acid has been assigned a hydropathic index on the basis of its hydrophobicity and charge characteristics. They are: isoleucine (+4.5); valine (+4.2); leucine (+3.8); phenylalanine (+2.8); cysteine/cystine (+2.5); methionine (+1.9); alanine (+1.8); glycine (−0.4); threonine (−0.7); serine (−0.8); tryptophan (−0.9); tyrosine (−1.3); proline (−1.6); histidine (−3.2); glutamate (−3.5); glutamine (−3.5); aspartate (−3.5); asparagine (−3.5); lysine (−3.9); and arginine (−4.5).

[0251] The importance of the hydropathic profile in conferring interactive biological function on a protein is understood in the art (see, e.g., Kyte et al., 1982, J Mol. Biol. 157:105-131). It is known that certain amino acids may be substituted for other amino acids having a similar hydropathic index or score and still retain a similar biological activity. In making changes based upon the hydropathic index, in certain embodiments, the substitution of amino acids whose hydropathic indices are within ±2 is included. In some aspects, those which are within ±1 are included, and in other aspects, those within ±0.5 are included.

[0252] It is also understood in the art that the substitution of like amino acids can be made effectively on the basis of hydrophilicity, particularly where the biologically functional protein or peptide thereby created is intended for use in immunological embodiments, as in the present case. In certain embodiments, the greatest local average hydrophilicity of a protein, as governed by the hydrophilicity of its adjacent amino acids, correlates with its immunogenicity and antigen-binding or immunogenicity, that is, with a biological property of the protein.

[0253] The following hydrophilicity values have been assigned to these amino acid residues: arginine (+3.0); lysine (+3.0); aspartate (+3.0±1); glutamate (+3.0±1); serine (+0.3); asparagine (+0.2); glutamine (+0.2); glycine (0); threonine (−0.4); proline (−0.5±1); alanine (−0.5); histidine (−0.5); cysteine (−1.0); methionine (−1.3); valine (−1.5); leucine (−1.8); isoleucine (−1.8); tyrosine (−2.3); phenylalanine (−2.5) and tryptophan (−3.4). In making changes based upon similar hydrophilicity values, in certain embodiments, the substitution of amino acids whose hydrophilicity values are within +2 is included, in other embodiments, those which are within +1 are included, and in still other embodiments, those within +0.5 are included. In some instances, one may also identify epitopes from primary amino acid sequences on the basis of hydrophilicity. These regions are also referred to as “epitopic core regions.”

[0254] Exemplary conservative amino acid substitutions are set forth in Table 6.

TABLE 8
Conservative Amino Acid Substitutions

| Original Residue | Exemplary Substitutions |
|---|---|
| Ala | Ser |
| Arg | Lys |
| Asn | Gln, His |
| Asp | Glu |
| Cys | Ser |
| Gln | Asn |
| Glu | Asp |
| Gly | Pro |
| His | Asn, Gln |
| Ile | Leu, Val |
| Leu | Ile, Val |
| Lys | Arg, Gln, Glu |
| Met | Leu, Ile |
| Phe | Met, Leu, Tyr |
| Ser | Thr |
| Thr | Ser |
| Trp | Tyr |
| Tyr | Trp, Phe |
| Val | Ile, Leu |

[0255] A skilled artisan will be able to determine suitable variants of polypeptides as set forth herein using well-known techniques. One skilled in the art may identify suitable areas of the molecule that may be changed without destroying activity by targeting regions not believed to be important for activity. The skilled artisan also will be able to identify residues and portions of the molecules that are conserved among similar polypeptides. In further embodiments, even areas that may be important for biological activity or for structure may be subject to conservative amino acid substitutions without destroying the biological activity or without adversely affecting the polypeptide structure.

[0256] Additionally, one skilled in the art can review structure-function studies identifying residues in similar polypeptides that are important for activity or structure. In view of such a comparison, one can predict the importance of amino acid residues in a protein that correspond to amino acid residues important for activity or structure in similar proteins. One skilled in the art may opt for chemically similar amino acid substitutions for such predicted important amino acid residues.

[0257] One skilled in the art can also analyze the 3-dimensional structure and amino acid sequence in relation to that structure in similar polypeptides. In view of such information, one skilled in the art may predict the alignment of amino acid residues of an antibody with respect to its three dimensional structure. One skilled in the art may choose not to make radical changes to amino acid residues predicted to be on the surface of the protein, since such residues may be involved in important interactions with other molecules. Moreover, one skilled in the art may generate test variants containing a single amino acid substitution at each desired amino acid residue. These variants can then be screened using assays for GIPR activity, thus yielding information regarding which amino acids can be changed and which must not be changed. In other words, based on information gathered from such routine experiments, one skilled in the art can readily determine the amino acid positions where further substitutions should be avoided either alone or in combination with other mutations.

[0258] A number of scientific publications have been devoted to the prediction of secondary structure. See, Moult, 1996, Curr. Op. in Biotech. 7:422-427; Chou et al., 1974, Biochem. 13:222-245; Chou et al., 1974, Biochemistry 113:211-222; Chou et al., 1978, Adv. Enzymol. Relat. Areas Mol. Biol. 47:45-148; Chou et al., 1979, Ann. Rev. Biochem. 47:251-276; and Chou et al., 1979, Biophys. J. 26:367-384. Moreover, computer programs are currently available to assist with predicting secondary structure. One method of predicting secondary structure is based upon homology modeling. For example, two polypeptides or proteins that have a sequence identity of greater than 30%, or similarity greater than 40% can have similar structural topologies. The recent growth of the protein structural database (PDB) has provided enhanced predictability of secondary structure, including the potential number of folds within a polypeptide's or protein's structure. See, Holm et al., 1999, Nucl. Acid. Res. 27:244-247. It has been suggested (Brenner et al., 1997, Curr. Op. Struct. Biol. 7:369-376) that there are a limited number of folds in a given polypeptide or protein and that once a critical number of structures have been resolved, structural prediction will become dramatically more accurate.

[0259] Additional methods of predicting secondary structure include “threading” (Jones, 1997, Curr. Opin. Struct. Biol. 7:377-387; Sippl et al., 1996, Structure 4:15-19), “profile analysis” (Bowie et al., 1991, Science 253:164-170; Gribskov et al., 1990, Meth. Enzym. 183:146-159; Gribskov et al., 1987, Proc. Nat. Acad. Sci. 84:4355-4358), and “evolutionary linkage” (See, Holm, 1999, supra; and Brenner, 1997, supra).

[0260] In some embodiments, amino acid substitutions are made that: (1) reduce susceptibility to proteolysis, (2) reduce susceptibility to oxidation, (3) alter binding affinity for forming protein complexes, (4) alter ligand or antigen binding affinities, and/or (4) confer or modify other physicochemical or functional properties on such polypeptides. For example, single or multiple amino acid substitutions (in certain embodiments, conservative amino acid substitutions) may be made in the naturally-occurring sequence. Substitutions can be made in that portion of the antibody that lies outside the domain(s) forming intermolecular contacts). In such embodiments, conservative amino acid substitutions can be used that do not substantially change the structural characteristics of the parent sequence (e.g., one or more replacement amino acids that do not disrupt the secondary structure that characterizes the parent or native antigen binding protein). Examples of art-recognized polypeptide secondary and tertiary structures are described in Proteins, Structures and Molecular Principles (Creighton, Ed.), 1984, W. H. New York: Freeman and Company; Introduction to Protein Structure (Branden and Tooze, eds.), 1991, New York: Garland Publishing; and Thornton et al., 1991, Nature 354:105, which are each incorporated herein by reference.

[0261] Additional preferred antibody variants include cysteine variants wherein one or more cysteine residues in the parent or native amino acid sequence are deleted from or substituted with another amino acid (e.g., serine). Cysteine variants are useful, inter alia when antibodies must be refolded into a biologically active conformation. Cysteine variants may have fewer cysteine residues than the native antibody, and typically have an even number to minimize interactions resulting from unpaired cysteines.

[0262] The heavy and light chains, variable regions domains and CDRs that are disclosed can be used to prepare polypeptides that contain an antigen binding region that can specifically bind to GIPR. For example, one or more of the CDRs can be incorporated into a molecule (e.g., a polypeptide) covalently or noncovalently to make an immunoadhesion. An immunoadhesion may incorporate the CDR(s) as part of a larger polypeptide chain, may covalently link the CDR(s) to another polypeptide chain, or may incorporate the CDR(s) noncovalently. The CDR(s) enable the immunoadhesion to bind specifically to a particular antigen of interest (e.g., an GIPR polypeptide or epitope thereof).

[0263] Mimetics (e.g., “peptide mimetics” or “peptidomimetics”) based upon the variable region domains and CDRs that are described herein are also provided. These analogs can be peptides, non-peptides or combinations of peptide and non-peptide regions. Fauchere, 1986, Adv. Drug Res. 15:29; Veber and Freidinger, 1985, TINS p. 392; and Evans et al., 1987, J Med. Chem. 30:1229, which are incorporated herein by reference for any purpose. Peptide mimetics that are structurally similar to therapeutically useful peptides may be used to produce a similar therapeutic or prophylactic effect. Such compounds are often developed with the aid of computerized molecular modeling. Generally, peptidomimetics are proteins that are structurally similar to an antibody displaying a desired biological activity, such as here the ability to specifically bind GIPR, but have one or more peptide linkages optionally replaced by a linkage selected from: —CH₂NH—, —CH₂S—, —CH₂—CH₂—, —CH—CH-(cis and trans), —COCH₂—, —CH(OH)CH₂—, and —CH₂SO—, by methods well known in the art. Systematic substitution of one or more amino acids of a consensus sequence with a D-amino acid of the same type (e.g., D-lysine in place of L-lysine) may be used in certain embodiments to generate more stable proteins. In addition, constrained peptides comprising a consensus sequence or a substantially identical consensus sequence variation may be generated by methods known in the art (Rizo and Gierasch, 1992, Ann. Rev. Biochem. 61:387), incorporated herein by reference), for example, by adding internal cysteine residues capable of forming intramolecular disulfide bridges which cyclize the peptide.

[0264] Derivatives of the antigen binding proteins that are described herein are also provided. The derivatized antigen binding proteins can comprise any molecule or substance that imparts a desired property to the antibody or fragment, such as increased half-life in a particular use. The derivatized antigen binding protein can comprise, for example, a detectable (or labeling) moiety (e.g., a radioactive, colorimetric, antigenic or enzymatic molecule, a detectable bead (such as a magnetic or electrodense (e.g., gold) bead), or a molecule that binds to another molecule (e.g., biotin or streptavidin)), a therapeutic or diagnostic moiety (e.g., a radioactive, cytotoxic, or pharmaceutically active moiety), or a molecule that increases the suitability of the antigen binding protein for a particular use (e.g., administration to a subject, such as a human subject, or other in vivo or in vitro uses). Examples of molecules that can be used to derivatize an antigen binding protein include albumin (e.g., human serum albumin) and polyethylene glycol (PEG). Albumin-linked and PEGylated derivatives of antigen binding proteins can be prepared using techniques well known in the art. Certain antigen binding proteins include a pegylated single chain polypeptide as described herein. In one embodiment, the antigen binding protein is conjugated or otherwise linked to transthyretin (TTR) or a TTR variant. The TTR or TTR variant can be chemically modified with, for example, a chemical selected from the group consisting of dextran, poly(n-vinyl pyrrolidone), polyethylene glycols, propropylene glycol homopolymers, polypropylene oxide/ethylene oxide co-polymers, polyoxyethylated polyols and polyvinyl alcohols.

[0265] Other derivatives include covalent or aggregative conjugates of GIPR antigen binding proteins with other proteins or polypeptides, such as by expression of recombinant fusion proteins comprising heterologous polypeptides fused to the N-terminus or C-terminus of an GIPR antigen binding protein. For example, the conjugated peptide may be a heterologous signal (or leader) polypeptide, e.g., the yeast alpha-factor leader, or a peptide such as an epitope tag. GIPR antigen binding protein-containing fusion proteins can comprise peptides added to facilitate purification or identification of the GIPR antigen binding protein (e.g., poly-His). A GIPR antigen binding protein also can be linked to the FLAG peptide as described in Hopp et al., 1988, Bio Technology 6:1204; and U.S. Pat. No. 5,011,912. The FLAG peptide is highly antigenic and provides an epitope reversibly bound by a specific monoclonal antibody (mAb), enabling rapid assay and facile purification of expressed recombinant protein. Reagents useful for preparing fusion proteins in which the FLAG peptide is fused to a given polypeptide are commercially available (Sigma, St. Louis, MO).

[0266] In some embodiments, the antigen binding protein comprises one or more labels. The term “labeling group” or “label” means any detectable label. Examples of suitable labeling groups include, but are not limited to, the following: radioisotopes or radionuclides (e.g., ³H, ¹⁴C, ¹⁵N, ³⁵S, ⁹⁰Y, ⁹⁹Tc, ¹¹¹In, ¹²⁵I, ¹³¹I), fluorescent groups (e.g., FITC, rhodamine, lanthanide phosphors), enzymatic groups (e.g., horseradish peroxidase, β-galactosidase, luciferase, alkaline phosphatase), chemiluminescent groups, biotinyl groups, or predetermined polypeptide epitopes recognized by a secondary reporter (e.g., leucine zipper pair sequences, binding sites for secondary antibodies, metal binding domains, epitope tags). In some embodiments, the labeling group is coupled to the antigen binding protein via spacer arms of various lengths to reduce potential steric hindrance. Various methods for labeling proteins are known in the art and may be used as is seen fit.

[0267] The term “effector group” means any group coupled to an antigen binding protein that acts as a cytotoxic agent. Examples for suitable effector groups are radioisotopes or radionuclides (e.g., ³H, ¹⁴C, ¹⁵N, ³⁵S ⁹⁰Y, ⁹⁹Tc, ¹¹¹In, ¹²⁵I, ¹³¹I). Other suitable groups include toxins, therapeutic groups, or chemotherapeutic groups. Examples of suitable groups include calicheamicin, auristatins, geldanamycin and maytansine. In some embodiments, the effector group is coupled to the antigen binding protein via spacer arms of various lengths to reduce potential steric hindrance.

[0268] In general, labels fall into a variety of classes, depending on the assay in which they are to be detected: a) isotopic labels, which may be radioactive or heavy isotopes; b) magnetic labels (e.g., magnetic particles); c) redox active moieties; d) optical dyes; enzymatic groups (e.g. horseradish peroxidase, β-galactosidase, luciferase, alkaline phosphatase); e) biotinylated groups; and f) predetermined polypeptide epitopes recognized by a secondary reporter (e.g., leucine zipper pair sequences, binding sites for secondary antibodies, metal binding domains, epitope tags, etc.). In some embodiments, the labeling group is coupled to the antigen binding protein via spacer arms of various lengths to reduce potential steric hindrance. Various methods for labeling proteins are known in the art.

[0269] Specific labels include optical dyes, including, but not limited to, chromophores, phosphors and fluorophores, with the latter being specific in many instances. Fluorophores can be either “small molecule” fluores, or proteinaceous fluores.

[0270] By “fluorescent label” is meant any molecule that may be detected via its inherent fluorescent properties. Suitable fluorescent labels include, but are not limited to, fluorescein, rhodamine, tetramethylrhodamine, eosin, erythrosin, coumarin, methyl-coumarins, pyrene, Malacite green, stilbene, Lucifer Yellow, Cascade BlueJ, Texas Red, IAEDANS, EDANS, BODIPY FL, LC Red 640, Cy 5, Cy 5.5, LC Red 705, Oregon green, the Alexa-Fluor dyes (Alexa Fluor 350, Alexa Fluor 430, Alexa Fluor 488, Alexa Fluor 546, Alexa Fluor 568, Alexa Fluor 594, Alexa Fluor 633, Alexa Fluor 660, Alexa Fluor 680), Cascade Blue, Cascade Yellow and R-phycoerythrin (PE) (Molecular Probes, Eugene, OR), FITC, Rhodamine, and Texas Red (Pierce, Rockford, IL), Cy5, Cy5.5, Cy7 (Amersham Life Science, Pittsburgh, PA). Suitable optical dyes, including fluorophores, are described in Molecular Probes Handbook by Richard P. Haugland, hereby expressly incorporated by reference.

[0271] Suitable proteinaceous fluorescent labels also include, but are not limited to, green fluorescent protein, including a Renilla, Ptilosarcus, or Aequorea species of GFP (Chalfie et al., 1994, Science 263:802-805), EGFP (Clontech Labs., Inc., Genbank Accession Number U55762), blue fluorescent protein (BFP, Quantum Biotechnologies, Inc., Quebec, Canada; Stauber, 1998, Biotechniques 24:462-471; Heim et al., 1996, Curr. Biol. 6:178-182), enhanced yellow fluorescent protein (EYFP, Clontech Labs., Inc.), luciferase (Ichiki et al., 1993, J. Immunol. 150:5408-5417), R galactosidase (Nolan et al., 1988, Proc. Natl. Acad. Sci. U.S.A. 85:2603-2607) and Renilla (WO92/15673, WO95/07463, WO98/14605, WO98/26277, WO99/49019, U.S. Pat. No. 5,292,658, No. 5418155, No. 5683888, No. 5741668, No. 5777079, No. 5804387, No. 5874304, No. 5876995, No. 5925558).

[0272] Nucleic acids that encode for the antigen binding proteins described herein, or portions thereof, are also provided, including nucleic acids encoding one or both chains of an antibody, or a fragment, derivative, mutein, or variant thereof, polynucleotides encoding heavy chain variable regions or only CDRs, polynucleotides sufficient for use as hybridization probes, PCR primers or sequencing primers for identifying, analyzing, mutating or amplifying a polynucleotide encoding a polypeptide, anti-sense nucleic acids for inhibiting expression of a polynucleotide, and complementary sequences of the foregoing. The nucleic acids can be any length. They can be, for example, 5, 10, 15, 20, 25, 30, 35, 40, 45, 50, 75, 100, 125, 150, 175, 200, 250, 300, 350, 400, 450, 500, 750, 1,000, 1,500, 3,000, 5,000 or more nucleotides in length, and/or can comprise one or more additional sequences, for example, regulatory sequences, and/or be part of a larger nucleic acid, for example, a vector. The nucleic acids can be single-stranded or double-stranded and can comprise RNA and/or DNA nucleotides, and artificial variants thereof (e.g., peptide nucleic acids). Any variable region provided herein may be attached to these constant regions to form complete heavy and light chain sequences. However, it should be understood that these constant regions sequences are provided as specific examples only. In some embodiments, the variable region sequences are joined to other constant region sequences that are known in the art.

[0273] Nucleic acids encoding certain antigen binding proteins, or portions thereof (e.g., full length antibody, heavy or light chain, variable domain, or CDRH1, CDRH2, CDRH3, CDRL1, CDRL2, or CDRL3) may be isolated from B-cells of mice that have been immunized with GIPR or an immunogenic fragment thereof. The nucleic acid may be isolated by conventional procedures such as polymerase chain reaction (PCR). Phage display is another example of a known technique whereby derivatives of antibodies and other antigen binding proteins may be prepared. In one approach, polypeptides that are components of an antigen binding protein of interest are expressed in any suitable recombinant expression system, and the expressed polypeptides are allowed to assemble to form antigen binding proteins.

[0274] An aspect further provides nucleic acids that hybridize to other nucleic acids under particular hybridization conditions. Methods for hybridizing nucleic acids are well-known in the art. See, e.g., Current Protocols in Molecular Biology, John Wiley & Sons, N.Y. (1989), 6.3.1-6.3.6. As defined herein, a moderately stringent hybridization condition uses a prewashing solution containing 5× sodium chloride/sodium citrate (SSC), 0.5% SDS, 1.0 mM EDTA (pH 8.0), hybridization buffer of about 50% formamide, 6×SSC, and a hybridization temperature of 55° C. (or other similar hybridization solutions, such as one containing about 50% formamide, with a hybridization temperature of 42° C.), and washing conditions of 60° C., in 0.5×SSC, 0.1% SDS. A stringent hybridization condition hybridizes in 6×SSC at 45° C., followed by one or more washes in 0.1×SSC, 0.2% SDS at 68° C. Furthermore, one of skill in the art can manipulate the hybridization and/or washing conditions to increase or decrease the stringency of hybridization such that nucleic acids comprising nucleotide sequences that are at least 65%, 70%, 75%, 80%, 85%, 90%, 95%, 98% or 99% identical to each other typically remain hybridized to each other.

[0275] The basic parameters affecting the choice of hybridization conditions and guidance for devising suitable conditions are set forth by, for example, Sambrook, Fritsch, and Maniatis (2001, Molecular Cloning: A Laboratory Manual, Cold Spring Harbor Laboratory Press, Cold Spring Harbor, N.Y., supra; and Current Protocols in Molecular Biology, 1995, Ausubel et al., eds., John Wiley & Sons, Inc., sections 2.10 and 6.3-6.4), and can be readily determined by those having ordinary skill in the art based on, e.g., the length and/or base composition of the nucleic acid.

[0276] Changes can be introduced by mutation into a nucleic acid, thereby leading to changes in the amino acid sequence of a polypeptide (e.g., an antibody or antibody derivative) that it encodes. Mutations can be introduced using any technique known in the art. In one embodiment, one or more particular amino acid residues are changed using, for example, a site-directed mutagenesis protocol. In another embodiment, one or more randomly selected residues is changed using, for example, a random mutagenesis protocol. However it is made, a mutant polypeptide can be expressed and screened for a desired property.

[0277] Mutations can be introduced into a nucleic acid without significantly altering the biological activity of a polypeptide that it encodes. For example, one can make nucleotide substitutions leading to amino acid substitutions at non-essential amino acid residues. Alternatively, one or more mutations can be introduced into a nucleic acid that selectively changes the biological activity of a polypeptide that it encodes. For example, the mutation can quantitatively or qualitatively change the biological activity. Examples of quantitative changes include increasing, reducing or eliminating the activity. Examples of qualitative changes include changing the antigen specificity of an antibody. In one embodiment, a nucleic acid encoding any antigen binding protein described herein can be mutated to alter the amino acid sequence using molecular biology techniques that are well-established in the art.

[0278] Another aspect provides nucleic acid molecules that are suitable for use as primers or hybridization probes for the detection of nucleic acid sequences. A nucleic acid molecule can comprise only a portion of a nucleic acid sequence encoding a full-length polypeptide, for example, a fragment that can be used as a probe or primer or a fragment encoding an active portion of a polypeptide.

[0279] Probes based on the sequence of a nucleic acid can be used to detect the nucleic acid or similar nucleic acids, for example, transcripts encoding a polypeptide. The probe can comprise a label group, e.g., a radioisotope, a fluorescent compound, an enzyme, or an enzyme co-factor. Such probes can be used to identify a cell that expresses the polypeptide.

[0280] Another aspect provides vectors comprising a nucleic acid encoding a polypeptide or a portion thereof (e.g., a fragment containing one or more CDRs or one or more variable region domains). Examples of vectors include, but are not limited to, plasmids, viral vectors, non-episomal mammalian vectors and expression vectors, for example, recombinant expression vectors. The recombinant expression vectors can comprise a nucleic acid in a form suitable for expression of the nucleic acid in a host cell. The recombinant expression vectors include one or more regulatory sequences, selected on the basis of the host cells to be used for expression, which is operably linked to the nucleic acid sequence to be expressed. Regulatory sequences include those that direct constitutive expression of a nucleotide sequence in many types of host cells (e.g., SV40 early gene enhancer, Rous sarcoma virus promoter and cytomegalovirus promoter), those that direct expression of the nucleotide sequence only in certain host cells (e.g., tissue-specific regulatory sequences, see, Voss et al., 1986, Trends Biochem. Sci. 11287, Maniatis et al., 1987, Science 236:1237, incorporated by reference herein in their entireties), and those that direct inducible expression of a nucleotide sequence in response to particular treatment or condition (e.g., the metallothionin promoter in mammalian cells and the tet-responsive and/or streptomycin responsive promoter in both prokaryotic and eukaryotic systems (see, id.). It will be appreciated by those skilled in the art that the design of the expression vector can depend on such factors as the choice of the host cell to be transformed, the level of expression of protein desired, etc. The expression vectors can be introduced into host cells to thereby produce proteins or peptides, including fusion proteins or peptides, encoded by nucleic acids as described herein.

[0281] Another aspect provides host cells into which a recombinant expression vector has been introduced. A host cell can be any prokaryotic cell (for example, E. coli) or eukaryotic cell (for example, yeast, insect, or mammalian cells (e.g., CHO cells)). Vector DNA can be introduced into prokaryotic or eukaryotic cells via conventional transformation or transfection techniques. For stable transfection of mammalian cells, it is known that, depending upon the expression vector and transfection technique used, only a small fraction of cells may integrate the foreign DNA into their genome. In order to identify and select these integrants, a gene that encodes a selectable marker (e.g., for resistance to antibiotics) is generally introduced into the host cells along with the gene of interest. Preferred selectable markers include those which confer resistance to drugs, such as G418, hygromycin and methotrexate. Cells stably transfected with the introduced nucleic acid can be identified by drug selection (e.g., cells that have incorporated the selectable marker gene will survive, while the other cells die), among other methods.

[0282] Expression systems and constructs in the form of plasmids, expression vectors, transcription or expression cassettes that comprise at least one polynucleotide as described above are also provided herein, as well host cells comprising such expression systems or constructs.

[0283] The antigen binding proteins provided herein may be prepared by any of a number of conventional techniques. For example, GIPR antigen binding proteins may be produced by recombinant expression systems, using any technique known in the art. See, e.g., Monoclonal Antibodies, Hybridomas: A New Dimension in Biological Analyses, Kennet et al. (eds.) Plenum Press, New York (1980); and Antibodies: A Laboratory Manual, Harlow and Lane (eds.), Cold Spring Harbor Laboratory Press, Cold Spring Harbor, N.Y. (1988).

[0284] Antigen binding proteins can be expressed in hybridoma cell lines (e.g., in particular antibodies may be expressed in hybridomas) or in cell lines other than hybridomas. Expression constructs encoding the antibodies can be used to transform a mammalian, insect or microbial host cell. Transformation can be performed using any known method for introducing polynucleotides into a host cell, including, for example packaging the polynucleotide in a virus or bacteriophage and transducing a host cell with the construct by transfection procedures known in the art, as exemplified by U.S. Pat. Nos. 4,399,216; 4,912,040; 4,740,461; 4,959,455. The optimal transformation procedure used will depend upon which type of host cell is being transformed. Methods for introduction of heterologous polynucleotides into mammalian cells are well known in the art and include, but are not limited to, dextran-mediated transfection, calcium phosphate precipitation, polybrene mediated transfection, protoplast fusion, electroporation, encapsulation of the polynucleotide(s) in liposomes, mixing nucleic acid with positively-charged lipids, and direct microinjection of the DNA into nuclei.

[0285] Recombinant expression constructs typically comprise a nucleic acid molecule encoding a polypeptide comprising one or more of the following: one or more CDRs provided herein; a light chain constant region; a light chain variable region; a heavy chain constant region (e.g., C_{H}1, C_{H}2 and/or C_{H}3); and/or another scaffold portion of a GIPR antigen binding protein. These nucleic acid sequences are inserted into an appropriate expression vector using standard ligation techniques. In one embodiment, the heavy or light chain constant region is appended to the C-terminus of the anti-GIPR specific heavy or light chain variable region and is ligated into an expression vector. The vector is typically selected to be functional in the particular host cell employed (i.e., the vector is compatible with the host cell machinery, permitting amplification and/or expression of the gene can occur). In some embodiments, vectors are used that employ protein-fragment complementation assays using protein reporters, such as dihydrofolate reductase (see, for example, U.S. Pat. No. 6,270,964, which is hereby incorporated by reference). Suitable expression vectors can be purchased, for example, from Invitrogen Life Technologies or BD Biosciences (formerly “Clontech”). Other useful vectors for cloning and expressing the antibodies and fragments include those described in Bianchi and McGrew, 2003, Biotech. Biotechnol. Bioeng. 84:439-44, which is hereby incorporated by reference. Additional suitable expression vectors are discussed, for example, in Methods Enzymol., vol. 185 (D. V. Goeddel, ed.), 1990, New York: Academic Press.

[0286] Typically, expression vectors used in any of the host cells will contain sequences for plasmid maintenance and for cloning and expression of exogenous nucleotide sequences. Such sequences, collectively referred to as “flanking sequences” in certain embodiments will typically include one or more of the following nucleotide sequences: a promoter, one or more enhancer sequences, an origin of replication, a transcriptional termination sequence, a complete intron sequence containing a donor and acceptor splice site, a sequence encoding a leader sequence for polypeptide secretion, a ribosome binding site, a polyadenylation sequence, a polylinker region for inserting the nucleic acid encoding the polypeptide to be expressed, and a selectable marker element. Each of these sequences is discussed below.

[0287] Optionally, the vector may contain a “tag”-encoding sequence, i.e., an oligonucleotide molecule located at the 5′ or 3′ end of the GIPR antigen binding protein coding sequence; the oligonucleotide sequence encodes polyHis (such as hexaHis), or another “tag” such as FLAG®, HA (hemaglutinin influenza virus), or myc, for which commercially available antibodies exist. This tag is typically fused to the polypeptide upon expression of the polypeptide, and can serve as a means for affinity purification or detection of the GIPR antigen binding protein from the host cell. Affinity purification can be accomplished, for example, by column chromatography using antibodies against the tag as an affinity matrix. Optionally, the tag can subsequently be removed from the purified GIPR antigen binding protein by various means such as using certain peptidases for cleavage.

[0288] Flanking sequences may be homologous (i.e., from the same species and/or strain as the host cell), heterologous (i.e., from a species other than the host cell species or strain), hybrid (i.e., a combination of flanking sequences from more than one source), synthetic or native. As such, the source of a flanking sequence may be any prokaryotic or eukaryotic organism, any vertebrate or invertebrate organism, or any plant, provided that the flanking sequence is functional in, and can be activated by, the host cell machinery.

[0289] Flanking sequences useful in the vectors may be obtained by any of several methods well known in the art. Typically, flanking sequences useful herein will have been previously identified by mapping and/or by restriction endonuclease digestion and can thus be isolated from the proper tissue source using the appropriate restriction endonucleases. In some cases, the full nucleotide sequence of a flanking sequence may be known. Here, the flanking sequence may be synthesized using the methods described herein for nucleic acid synthesis or cloning.

[0290] Whether all or only a portion of the flanking sequence is known, it may be obtained using polymerase chain reaction (PCR) and/or by screening a genomic library with a suitable probe such as an oligonucleotide and/or flanking sequence fragment from the same or another species. Where the flanking sequence is not known, a fragment of DNA containing a flanking sequence may be isolated from a larger piece of DNA that may contain, for example, a coding sequence or even another gene or genes. Isolation may be accomplished by restriction endonuclease digestion to produce the proper DNA fragment followed by isolation using agarose gel purification, Qiagen® column chromatography (Chatsworth, CA), or other methods known to the skilled artisan. The selection of suitable enzymes to accomplish this purpose will be readily apparent to one of ordinary skill in the art.

[0291] An origin of replication is typically a part of those prokaryotic expression vectors purchased commercially, and the origin aids in the amplification of the vector in a host cell. If the vector of choice does not contain an origin of replication site, one may be chemically synthesized based on a known sequence, and ligated into the vector. For example, the origin of replication from the plasmid pBR322 (New England Biolabs, Beverly, MA) is suitable for most gram-negative bacteria, and various viral origins (e.g., SV40, polyoma, adenovirus, vesicular stomatitus virus (VSV), or papillomaviruses such as HPV or BPV) are useful for cloning vectors in mammalian cells. Generally, the origin of replication component is not needed for mammalian expression vectors (for example, the SV40 origin is often used only because it also contains the virus early promoter).

[0292] A transcription termination sequence is typically located 3′ to the end of a polypeptide coding region and serves to terminate transcription. Usually, a transcription termination sequence in prokaryotic cells is a G-C rich fragment followed by a poly-T sequence. While the sequence is easily cloned from a library or even purchased commercially as part of a vector, it can also be readily synthesized using methods for nucleic acid synthesis such as those described herein.

[0293] A selectable marker gene encodes a protein necessary for the survival and growth of a host cell grown in a selective culture medium. Typical selection marker genes encode proteins that (a) confer resistance to antibiotics or other toxins, e.g., ampicillin, tetracycline, or kanamycin for prokaryotic host cells; (b) complement auxotrophic deficiencies of the cell; or (c) supply critical nutrients not available from complex or defined media. Specific selectable markers are the kanamycin resistance gene, the ampicillin resistance gene, and the tetracycline resistance gene. Advantageously, a neomycin resistance gene may also be used for selection in both prokaryotic and eukaryotic host cells.

[0294] Other selectable genes may be used to amplify the gene that will be expressed. Amplification is the process wherein genes that are required for production of a protein critical for growth or cell survival are reiterated in tandem within the chromosomes of successive generations of recombinant cells. Examples of suitable selectable markers for mammalian cells include dihydrofolate reductase (DHFR) and promoterless thyrnidine kinase genes. Mammalian cell transformants are placed under selection pressure wherein only the transformants are uniquely adapted to survive by virtue of the selectable gene present in the vector. Selection pressure is imposed by culturing the transformed cells under conditions in which the concentration of selection agent in the medium is successively increased, thereby leading to the amplification of both the selectable gene and the DNA that encodes another gene, such as an antigen binding protein that binds GIPR polypeptide. As a result, increased quantities of a polypeptide such as an antigen binding protein are synthesized from the amplified DNA.

[0295] A ribosome-binding site is usually necessary for translation initiation of mRNA and is characterized by a Shine-Dalgamo sequence (prokaryotes) or a Kozak sequence (eukaryotes). The element is typically located 3′ to the promoter and 5′ to the coding sequence of the polypeptide to be expressed.

[0296] In some cases, such as where glycosylation is desired in a eukaryotic host cell expression system, one may manipulate the various pre- or pro-sequences to improve glycosylation or yield. For example, one may alter the peptidase cleavage site of a particular signal peptide, or add prosequences, which also may affect glycosylation. The final protein product may have, in the −1 position (relative to the first amino acid of the mature protein), one or more additional amino acids incident to expression, which may not have been totally removed. For example, the final protein product may have one or two amino acid residues found in the peptidase cleavage site, attached to the amino-terminus. Alternatively, use of some enzyme cleavage sites may result in a slightly truncated form of the desired polypeptide, if the enzyme cuts at such area within the mature polypeptide.

[0297] Expression and cloning will typically contain a promoter that is recognized by the host organism and operably linked to the molecule encoding the GIPR antigen binding protein. Promoters are untranscribed sequences located upstream (i.e., 5′) to the start codon of a structural gene (generally within about 100 to 1000 bp) that control transcription of the structural gene. Promoters are conventionally grouped into one of two classes: inducible promoters and constitutive promoters. Inducible promoters initiate increased levels of transcription from DNA under their control in response to some change in culture conditions, such as the presence or absence of a nutrient or a change in temperature. Constitutive promoters, on the other hand, uniformly transcribe a gene to which they are operably linked, that is, with little or no control over gene expression. A large number of promoters, recognized by a variety of potential host cells, are well known. A suitable promoter is operably linked to the DNA encoding heavy chain or light chain comprising a GIPR antigen binding protein by removing the promoter from the source DNA by restriction enzyme digestion and inserting the desired promoter sequence into the vector.

[0298] Suitable promoters for use with yeast hosts are also well known in the art. Yeast enhancers are advantageously used with yeast promoters. Suitable promoters for use with mammalian host cells are well known and include, but are not limited to, those obtained from the genomes of viruses such as polyoma virus, fowlpox virus, adenovirus (such as Adenovirus 2), bovine papilloma virus, avian sarcoma virus, cytomegalovirus, retroviruses, hepatitis-B virus, and Simian Virus 40 (SV40). Other suitable mammalian promoters include heterologous mammalian promoters, for example, heat-shock promoters and the actin promoter.

[0299] An enhancer sequence may be inserted into the vector to increase transcription of DNA encoding light chain or heavy chain comprising a GIPR antigen binding protein by higher eukaryotes. Enhancers are cis-acting elements of DNA, usually about 10-300 bp in length, that act on the promoter to increase transcription. Enhancers are relatively orientation and position independent, having been found at positions both 5′ and 3′ to the transcription unit. Several enhancer sequences available from mammalian genes are known (e.g., globin, elastase, albumin, alpha-feto-protein and insulin). Typically, however, an enhancer from a virus is used. The SV40 enhancer, the cytomegalovirus early promoter enhancer, the polyoma enhancer, and adenovirus enhancers known in the art are exemplary enhancing elements for the activation of eukaryotic promoters. While an enhancer may be positioned in the vector either 5′ or 3′ to a coding sequence, it is typically located at a site 5′ from the promoter. A sequence encoding an appropriate native or heterologous signal sequence (leader sequence or signal peptide) can be incorporated into an expression vector, to promote extracellular secretion of the antibody. The choice of signal peptide or leader depends on the type of host cells in which the antibody is to be produced, and a heterologous signal sequence can replace the native signal sequence. Examples of signal peptides that are functional in mammalian host cells include the following: the signal sequence for interleukin-7 (IL-7) described in U.S. Pat. No. 4,965,195; the signal sequence for interleukin-2 receptor described in Cosman et al., 1984, Nature 312:768; the interleukin-4 receptor signal peptide described in EP Patent No. 0367 566; the type I interleukin-1 receptor signal peptide described in U.S. Pat. No. 4,968,607; the type II interleukin-1 receptor signal peptide described in EP Patent No. 0 460 846.

[0300] In one embodiment the leader sequence comprises SEQ ID NO: 3157 (MDMRVPAQLL GLLLLWLRGA RC) which is encoded by SEQ ID NO: 3158 (atggacatga gagtgcctgc acagctgctg ggcctgctgc tgctgtggct gagaggcgcc agatgc). In another embodiment the leader sequence comprises SEQ ID NO: 3159 (MAWALLLLTL LTQGTGSWA) which is encoded by SEQ ID NO: 3160 (atggcctggg ctctgctgct cctcaccctc ctcactcagg gcacagggtc ctgggcc).

[0301] The expression vectors that are provided may be constructed from a starting vector such as a commercially available vector. Such vectors may or may not contain all of the desired flanking sequences. Where one or more of the flanking sequences described herein are not already present in the vector, they may be individually obtained and ligated into the vector. Methods used for obtaining each of the flanking sequences are well known to one skilled in the art.

[0302] After the vector has been constructed and a nucleic acid molecule encoding light chain, a heavy chain, or a light chain and a heavy chain comprising a GIPR antigen binding sequence has been inserted into the proper site of the vector, the completed vector may be inserted into a suitable host cell for amplification and/or polypeptide expression. The transformation of an expression vector for an antigen-binding protein into a selected host cell may be accomplished by well-known methods including transfection, infection, calcium phosphate co-precipitation, electroporation, microinjection, lipofection, DEAE-dextran mediated transfection, or other known techniques. The method selected will in part be a function of the type of host cell to be used. These methods and other suitable methods are well known to the skilled artisan, and are set forth, for example, in Sambrook et al., 2001, supra.

[0303] A host cell, when cultured under appropriate conditions, synthesizes an antigen binding protein that can subsequently be collected from the culture medium (if the host cell secretes it into the medium) or directly from the host cell producing it (if it is not secreted). The selection of an appropriate host cell will depend upon various factors, such as desired expression levels, polypeptide modifications that are desirable or necessary for activity (such as glycosylation or phosphorylation) and ease of folding into a biologically active molecule.

[0304] Mammalian cell lines available as hosts for expression are well known in the art and include, but are not limited to, immortalized cell lines available from the American Type Culture Collection (ATCC), including but not limited to Chinese hamster ovary (CHO) cells, HeLa cells, baby hamster kidney (BHK) cells, monkey kidney cells (COS), human hepatocellular carcinoma cells (e.g., Hep G2), and a number of other cell lines. In certain embodiments, cell lines may be selected through determining which cell lines have high expression levels and constitutively produce antigen binding proteins with GIPR binding properties. In another embodiment, a cell line from the B cell lineage that does not make its own antibody but has a capacity to make and secrete a heterologous antibody can be selected.

[0305] In one embodiment, the present invention is directed to an antigen binding protein produced by a cell expressing one or more of the polynucleotides identified in Tables 2, 3, 4, and 5.

[0306] In one aspect, a GIPR binding protein is administered for chronic treatment. In another aspect, the binding proteins are administered for acute therapy.

[0307] Pharmaceutical compositions that comprise a GIPR antigen binding protein are also provided and can be utilized in any of the preventive and therapeutic methods disclosed herein. In an embodiment, a therapeutically effective amount of one or a plurality of the antigen binding proteins and a pharmaceutically acceptable diluent, carrier, solubilizer, emulsifier, preservative, and/or adjuvant are also provided. Acceptable formulation materials are nontoxic to recipients at the dosages and concentrations employed.

[0308] In certain embodiments, the pharmaceutical composition may contain formulation materials for modifying, maintaining or preserving, for example, the pH, osmolarity, viscosity, clarity, color, isotonicity, odor, sterility, stability, rate of dissolution or release, adsorption or penetration of the composition. In such embodiments, suitable formulation materials include, but are not limited to, amino acids (such as glycine, glutamine, asparagine, arginine or lysine); antimicrobials; antioxidants (such as ascorbic acid, sodium sulfite or sodium hydrogen-sulfite); buffers (such as borate, bicarbonate, Tris-HCl, citrates, phosphates or other organic acids); bulking agents (such as mannitol or glycine); chelating agents (such as ethylenediamine tetraacetic acid (EDTA)); complexing agents (such as caffeine, polyvinylpyrrolidone, beta-cyclodextrin or hydroxypropyl-beta-cyclodextrin); fillers; monosaccharides; disaccharides; and other carbohydrates (such as glucose, mannose or dextrins); proteins (such as serum albumin, gelatin or immunoglobulins); coloring, flavoring and diluting agents; emulsifying agents; hydrophilic polymers (such as polyvinylpyrrolidone); low molecular weight polypeptides; salt-forming counterions (such as sodium); preservatives (such as benzalkonium chloride, benzoic acid, salicylic acid, thimerosal, phenethyl alcohol, methylparaben, propylparaben, chlorhexidine, sorbic acid or hydrogen peroxide); solvents (such as glycerin, propylene glycol or polyethylene glycol); sugar alcohols (such as mannitol or sorbitol); suspending agents; surfactants or wetting agents (such as pluronics, PEG, sorbitan esters, polysorbates such as polysorbate 20, polysorbate, 20 triton, tromethamine, lecithin, cholesterol, tyloxapal); stability enhancing agents (such as sucrose or sorbitol); tonicity enhancing agents (such as alkali metal halides, preferably sodium or potassium chloride, mannitol sorbitol); delivery vehicles; diluents; excipients and/or pharmaceutical adjuvants. REMINGTON'S PHARMACEUTICAL SCIENCES, 18″ Edition, (A. R. Genrmo, ed.), 1990, Mack Publishing Company provides additional details and options for suitable agents that can be incorporated into the pharmaceutical compositions.

[0309] In certain embodiments, the optimal pharmaceutical composition will be determined by one skilled in the art depending upon, for example, the intended route of administration, delivery format and desired dosage. See, for example, REMINGTON'S PHARMACEUTICAL SCIENCES, supra. In certain embodiments, such compositions may influence the physical state, stability, rate of in vivo release and rate of in vivo clearance of the antigen binding proteins disclosed. In certain embodiments, the primary vehicle or carrier in a pharmaceutical composition may be either aqueous or non-aqueous in nature. For example, a suitable vehicle or carrier may be water for injection or physiological saline solution. In certain embodiments, GIPR antigen binding protein compositions may be prepared for storage by mixing the selected composition having the desired degree of purity with optional formulation agents (REMINGTON'S PHARMACEUTICAL SCIENCES, supra) in the form of a lyophilized cake or an aqueous solution. Further, in certain embodiments, the GIPR antigen binding protein may be formulated as a lyophilizate using appropriate excipients such as sucrose.

[0310] The pharmaceutical compositions can be selected for parenteral delivery. Alternatively, the compositions may be selected for inhalation or for delivery through the digestive tract, such as orally. Preparation of such pharmaceutically acceptable compositions is within the skill of the art.

[0311] The formulation components are present preferably in concentrations that are acceptable to the site of administration. In certain embodiments, buffers are used to maintain the composition at physiological pH or at a slightly lower pH, typically within a pH range of from about 5 to about 8.

[0312] When parenteral administration is contemplated, the therapeutic compositions may be provided in the form of a pyrogen-free, parenterally acceptable aqueous solution comprising the desired human GIPR antigen binding protein in a pharmaceutically acceptable vehicle. A particularly suitable vehicle for parenteral injection is sterile distilled water in which the GIPR antigen binding protein is formulated as a sterile, isotonic solution, properly preserved. In certain embodiments, the preparation can involve the formulation of the desired molecule with an agent, such as injectable microspheres, bio-erodible particles, polymeric compounds (such as polylactic acid or polyglycolic acid), beads or liposomes, that may provide controlled or sustained release of the product which can be delivered via depot injection. In certain embodiments, hyaluronic acid may also be used, having the effect of promoting sustained duration in the circulation. In certain embodiments, implantable drug delivery devices may be used to introduce the desired antigen binding protein.

[0313] Certain pharmaceutical compositions are formulated for inhalation. In some embodiments, GIPR antigen binding proteins are formulated as a dry, inhalable powder. In specific embodiments, GIPR antigen binding protein inhalation solutions may also be formulated with a propellant for aerosol delivery. In certain embodiments, solutions may be nebulized. Pulmonary administration and formulation methods therefore are further described in International Patent Application No. PCT/US94/001875, which is incorporated by reference and describes pulmonary delivery of chemically modified proteins. Some formulations can be administered orally. GIPR antigen binding proteins that are administered in this fashion can be formulated with or without carriers customarily used in the compounding of solid dosage forms such as tablets and capsules. In certain embodiments, a capsule may be designed to release the active portion of the formulation at the point in the gastrointestinal tract when bioavailability is maximized and pre-systemic degradation is minimized. Additional agents can be included to facilitate absorption of the GIPR antigen binding protein. Diluents, flavorings, low melting point waxes, vegetable oils, lubricants, suspending agents, tablet disintegrating agents, and binders may also be employed.

[0314] Some pharmaceutical compositions comprise an effective quantity of one or a plurality of GIPR antigen binding proteins in a mixture with non-toxic excipients that are suitable for the manufacture of tablets. By dissolving the tablets in sterile water, or another appropriate vehicle, solutions may be prepared in unit-dose form. Suitable excipients include, but are not limited to, inert diluents, such as calcium carbonate, sodium carbonate or bicarbonate, lactose, or calcium phosphate; or binding agents, such as starch, gelatin, or acacia; or lubricating agents such as magnesium stearate, stearic acid, or talc.

[0315] Additional pharmaceutical compositions will be evident to those skilled in the art, including formulations involving GIPR binding proteins in sustained- or controlled-delivery formulations. Techniques for formulating a variety of other sustained- or controlled-delivery means, such as liposome carriers, bio-erodible microparticles or porous beads and depot injections, are also known to those skilled in the art. See, for example, International Patent Application No. PCT/US93/00829, which is incorporated by reference and describes controlled release of porous polymeric microparticles for delivery of pharmaceutical compositions. Sustained-release preparations may include semipermeable polymer matrices in the form of shaped articles, e.g., films, or microcapsules. Sustained release matrices may include polyesters, hydrogels, polylactides (as disclosed in U.S. Pat. No. 3,773,919 and European Patent Application Publication No. EP 058481, each of which is incorporated by reference), copolymers of L-glutamic acid and gamma ethyl-L-glutamate (Sidman et al., 1983, Biopolymers 2:547-556), poly (2-hydroxyethyl-methacrylate) (Langer et al., 1981, J. Biomed. Mater. Res. 15:167-277 and Langer, 1982, Chem. Tech. 12:98-105), ethylene vinyl acetate (Langer et al., 1981, supra) or poly-D(−)-3-hydroxybutyric acid (European Patent Application Publication No. EP 133,988). Sustained release compositions may also include liposomes that can be prepared by any of several methods known in the art. See, e.g., Eppstein et al., 1985, Proc. Nat. Acad. Sci. U.S.A. 82:3688-3692; European Patent Application Publication Nos. EP 036,676; EP 088,046 and EP 143,949, incorporated by reference.

[0316] Pharmaceutical compositions used for in vivo administration are typically provided as sterile preparations. Sterilization can be accomplished by filtration through sterile filtration membranes. When the composition is lyophilized, sterilization using this method may be conducted either prior to or following lyophilization and reconstitution. Compositions for parenteral administration can be stored in lyophilized form or in a solution. Parenteral compositions generally are placed into a container having a sterile access port, for example, an intravenous solution bag or vial having a stopper pierceable by a hypodermic injection needle.

[0317] In certain formulations, an antigen binding protein has a concentration of at least 10 mg/mL, 20 mg/mL, 30 mg/mL, 40 mg/mL, 50 mg/mL, 60 mg/mL, 70 mg/mL, 80 mg/mL, 90 mg/mL, 100 mg/mL or 150 mg/mL. In one embodiment, a pharmaceutical composition comprises the antigen binding protein, a buffer and polysorbate. In other embodiments, the pharmaceutical composition comprises an antigen binding protein, a buffer, sucrose and polysorbate. An example of a pharmaceutical composition is one containing 50-100 mg/mL of antigen binding protein, 5-20 mM sodium acetate, 5-10% w/v sucrose, and 0.002-0.008% w/v polysorbate. Certain, compositions, for instance, contain 65-75 mg/mL of an antigen binding protein in 9-11 mM sodium acetate buffer, 8-10% w/v sucrose, and 0.005-0.006% w/v polysorbate. The pH of certain such formulations is in the range of 4.5-6. Other formulations have a pH of 5.0-5.5 (e.g., pH of 5.0, 5.2 or 5.4).

[0318] Once the pharmaceutical composition has been formulated, it may be stored in sterile vials as a solution, suspension, gel, emulsion, solid, crystal, or as a dehydrated or lyophilized powder. Such formulations may be stored either in a ready-to-use form or in a form (e.g., lyophilized) that is reconstituted prior to administration. Kits for producing a single-dose administration unit are also provided. Certain kits contain a first container having a dried protein and a second container having an aqueous formulation. In certain embodiments, kits containing single and multi-chambered pre-filled syringes (e.g., liquid syringes and lyosyringes) are provided. The therapeutically effective amount of a GIPR antigen binding protein-containing pharmaceutical composition to be employed will depend, for example, upon the therapeutic context and objectives. One skilled in the art will appreciate that the appropriate dosage levels for treatment will vary depending, in part, upon the molecule delivered, the indication for which the GIPR antigen binding protein is being used, the route of administration, and the size (body weight, body surface or organ size) and/or condition (the age and general health) of the patient. In certain embodiments, the clinician may titer the dosage and modify the route of administration to obtain the optimal therapeutic effect.

[0319] Dosing frequency will depend upon the pharmacokinetic parameters of the particular GIPR antigen binding protein in the formulation used. Typically, a clinician administers the composition until a dosage is reached that achieves the desired effect. The composition may therefore be administered as a single dose, or as two or more doses (which may or may not contain the same amount of the desired molecule) over time, or as a continuous infusion via an implantation device or catheter. Appropriate dosages may be ascertained through use of appropriate dose-response data. In certain embodiments, the antigen binding proteins can be administered to patients throughout an extended time period. In certain embodiments, the antigen binding protein is dosed every two weeks, every month, every two months, every three months, every four months, every five months, or every six months.

[0320] The route of administration of the pharmaceutical composition is in accord with known methods, e.g., orally, through injection by intravenous, intraperitoneal, intracerebral (intra-parenchymal), intracerebroventricular, intramuscular, intra-ocular, intraarterial, intraportal, or intralesional routes; by sustained release systems or by implantation devices. In certain embodiments, the compositions may be administered by bolus injection or continuously by infusion, or by implantation device.

[0321] The composition also may be administered locally via implantation of a membrane, sponge or another appropriate material onto which the desired molecule has been absorbed or encapsulated. In certain embodiments, where an implantation device is used, the device may be implanted into any suitable tissue or organ, and delivery of the desired molecule may be via diffusion, timed-release bolus, or continuous administration.

[0322] It also may be desirable to use GIPR antigen binding protein pharmaceutical compositions according to the disclosed ex vivo. In such instances, cells, tissues or organs that have been removed from the patient are exposed to GIPR antigen binding protein pharmaceutical compositions after which the cells, tissues and/or organs are subsequently implanted back into the patient.

[0323] A physician will be able to select an appropriate treatment indication and target lipid levels depending on the individual profile of a particular patient. One well-accepted standard for guiding treatment of hyperlipidemia is the Third Report of the National Cholesterol Education Program (NCEP) Expert Panel on Detection, Evaluation, and Treatment of the High Blood Cholesterol in Adults (Adult Treatment Panel III) Final Report, National Institutes of Health, NIH Publication No. 02-5215 (2002), the printed publication of which is hereby incorporated by reference in its entirety.

[0324] The efficacy of a particular dose can be assessed by reference to biomarkers or improvement in certain physiological parameters. Examples of suitable biomarkers include, the ratio of free cholesterol to plasma lipid, free cholesterol to membrane protein, phospatidylcholine to sphingomyelin, or HDL-C levels.

[0325] Also provided herein are compositions comprising a GIPR antigen binding protein and one or more additional therapeutic agents, as well as methods in which such agents are administered concurrently or sequentially with a GIPR antigen binding protein for use in the preventive and therapeutic methods disclosed herein. The one or more additional agents can be co-formulated with a GIPR antigen binding protein or can be co-administered with a GIPR antigen binding protein. In general, the therapeutic methods, compositions and compounds may also be employed in combination with other therapeutics in the treatment of various disease states, with the additional agents being administered concurrently.

[0326] In one aspect the present invention is directed to a method of treating a subject with a metabolic disorder, the method comprising administering to the subject a composition comprising a GIPR antagonist that inhibits GIPR function and a GLP-1 receptor agonist, wherein the GLP-1 receptor agonist is conjugated to the GIPR antagonist. In one embodiment the GIPR antagonist inhibits GIP binding to GIPR.

[0327] In one aspect the present invention is directed to a method of treating a subject with a metabolic disorder, the method comprising administering to the subject a composition comprising an antibody or functional fragment thereof that specifically binds to human GIPR, wherein the antibody or functional fragment thereof comprises a cysteine or non-canonical amino acid amino acid substitution at one or more conjugation site(s); and a GLP-1 receptor agonist, wherein the GLP-1 receptor agonist is conjugated to the antibody or functional fragment thereof through the side-chain of the cysteine residue or non-canonical amino acid residue substituted at the one or more conjugation site(s).

[0328] In one aspect the present invention is directed to a method of treating a subject with a metabolic disorder, the method comprising administering to the subject a therapeutically effective amount of a GLP-1 receptor agonist and a therapeutically effective amount of a GIPR antagonist that specifically binds to a protein having an amino acid sequence having at least 90% amino acid sequence identity to an amino acid sequence of a GIPR, wherein the GIPR antagonist is conjugated to the GLP-1 receptor agonist. Such conjugated molecules can be referred to as “anti-GIPR/GLP-1R bispecific conjugate”, “anti-GIPR/GLP-1R peptide conjugate”, “anti-GIPR/GLP-1R conjugate”, or even “bispecific conjugate”.

[0329] In one aspect the present invention is directed to a method of promoting GIPR and GLP-1R internalization into the cell upon which they are co-expressed by administering a GIPR antagonist conjugated to a GLP-1 receptor agonist to the cell. In one embodiment, the GIPR and GLP-1R are co-localized while being internalized.

[0330] In one aspect the present invention is directed to a method of stimulating calcium flux in a cell by administering a GIPR antagonist conjugated to a GLP-1 receptor agonist to the cell.

[0331] In one aspect the present invention is directed to a method of promoting beta-arrestin recruitment in a cell by administering a GIPR antagonist conjugated to a GLP-1 receptor agonist to the cell.

[0332] In one aspect the present invention is directed to a method of stimulating insulin secretion from a cell by administering a GIPR antagonist conjugated to a GLP-1 receptor agonist to the cell. In one embodiment the cell is a human pancreatic microislet.

[0333] A “GLP-1 receptor agonist” refers to compounds having GLP-1 receptor activity. Such exemplary compounds include exendins, exendin analogs, exendin agonists, GLP-1(7-37), GLP-1(7-37) analogs, GLP-1(7-37) agonists, and the like. The GLP-1 receptor agonist compounds may optionally be amidated. The terms “GLP-1 receptor agonist” and “GLP-1 receptor agonist compound” have the same meaning.

[0334] The term “exendin” includes naturally occurring (or synthetic versions of naturally occurring) exendin peptides that are found in the salivary secretions of the Gila monster. Exendins of particular interest include exendin-3 and exendin-4. The exendins, exendin analogs, and exendin agonists for use in the methods described herein may optionally be amidated, and may also be in an acid form, pharmaceutically acceptable salt form, or any other physiologically active form of the molecule.

[0335] In one embodiment, the GLP-1 receptor agonist is GLP-1(7-37) or a GLP-1(7-37) analog.

[0336] In one embodiment, the GLP-1 receptor agonist is selected from the group consisting of exenatide, liraglutide, lixisenatide, albiglutide, dulaglutide, semaglutide, and taspoglutide.

[0337] In one aspect the present invention is directed to a method of treatment comprising administering to a subject a therapeutically effective amount of at least one GLP-1 receptor agonist in combination with administration of at least one GIPR antagonist, wherein the GIPR antagmonist is conjugated to the GLP-1 receptor agonist, which upon administration to a subject with symptoms of a metabolic disorder provides sustained beneficial effects.

[0338] In one embodiment, administration of at least one GLP-1 receptor agonist in combination with administration of at least one GIPR antagonist provides sustained beneficial effects of at least one symptom of a metabolic disorder.

[0339] In one embodiment, the therapeutically effective amounts of the GLP-1 receptor agonist and the GIPR antagonist are combined prior to administration to the subject.

[0340] In one embodiment, the therapeutically effective amounts of the GLP-1 receptor agonist and the GIPR antagonist are administered to the subject sequentially.

[0341] In one embodiment, the therapeutically effective amounts of a GLP-1 receptor agonist and a GIPR antagonist are synergistically effective amounts.

[0342] Exendin-4 (HGEGTFTSDLSKQMEEEAVRLFIEWLKNGGPSSGAPPPS-NH₂ (SEQ ID NO: 3163)) is a peptide found in the saliva of the Gila monster, Heloderma suspectum; and exendin-3 (HSDGTFTSDLSKQMEEEAVRLFIEWLKNGGPSSGAPPPS-NH₂(SEQ ID NO: 3164)) is a peptide found in the saliva of the beaded lizard, Heloderma horridum. Exendins have some amino acid sequence similarity to some members of the glucagon-like peptide (GLP) family. For example, exendin-4 has about 53% sequence identity with glucagon-like peptide-1(GLP-1)(7-37) (HAEGTFTSDVSSYLEGQAAKEFIAWLVKGRG (SEQ ID NO: 3184)). However, exendin-4 is transcribed from a distinct gene, not the Gila monster homolog of the mammalian proglucagon gene from which GLP-1 is expressed. Additionally, exendin-4 is not an analog of GLP-1(7-37) because the structure of synthetic exendin-4 peptide was not created by sequential modification of the structure of GLP-1. Nielsen et al., Current Opinion in Investigational Drugs, 4(4):401-405 (2003).

[0343] Synthetic exendin-4, also known as exenatide, is commercially available as BYETTA® (Amylin Pharmaceuticals, Inc. and Eli Lilly and Company). A once weekly formulation of exenatide is described in WO 2005/102293, the disclosure of which is incorporated by reference herein.

[0344] “Exendin analog” refers to peptides which elicit a biological activity of an exendin reference peptide, preferably having a potency equal to or better than the exendin reference peptide (e.g., exendin-4), or within five orders of magnitude (plus or minus) of potency compared to the exendin reference peptide, when evaluated by art-known measures such as receptor binding and/or competition studies as described, e.g., by Hargrove et al., Regulatory Peptides, 141:113-119 (2007), the disclosure of which is incorporated by reference herein. Preferably, the exendin analogs will bind in such assays with an affinity of less than 1 μM, and more preferably with an affinity of less than 3 nM, less than 1 nM, or less than 0.1 nM. The term “exendin analog” may also be referred to as “exendin agonist”. In a preferred embodiment, the exendin analog is an exendin-4 analog.

[0345] Exendin analogs also include the peptides described herein which have been chemically derivatized or altered, for example, peptides with non-natural amino acid residues (e.g., taurine, β-amino acid residues, γ-amino acid residues, and D-amino acid residues), C-terminal functional group modifications, such as amides, esters, and C-terminal ketone modifications and N-terminal functional group modifications, such as acylated amines, Schiff bases, or cyclization, as found, for example, in the amino acid pyroglutamic acid. Exendin analogs may also contain other chemical moieties, such as peptide mimetics.

[0346] Exemplary exendins and exendin analogs exendin-4 (SEQ ID NO: 3163): exendin-3 (SEQ ID NO: 3164); Leu¹⁴-exendin-4 (SEQ ID NO: 3165); Leu¹⁴,Phe²⁵-exendin-4 (SEQ ID NO: 3166); Leu⁴Ala⁹,Phe²⁵-exendin-4 (SEQ ID NO: 3167); exendin-4(1-30) (SEQ ID NO: 3168); Leu⁴-exendin-4(1-30) (SEQ ID NO: 3169); Leu⁴,Phe²-exendin-4(1-30) (SEQ ID NO: 3170); Leu¹⁴Ala¹⁹,Phe²⁵-exendin-4(1-30) (SEQ ID NO: 3171); exendin-4(1-28) (SEQ ID NO: 3172); Leu¹⁴-exendin-4(1-28) (SEQ ID NO: 3173); Leu¹⁴,Phe²⁵-exendin-4(1-28) (SEQ TD NO: 3174); Leu¹⁴,Ala¹⁹,Phe²⁵-exendin-4 (1-28) (SEQ ID NO: 3175); Leu¹⁴,Lys^{17,20},Ala¹⁹,Glu²¹Phe²Gln²⁸-exendin-4 (SEQ ID NO: 3176); Leu¹⁴,Lys^{17,20},Ala¹⁹,Glu²¹,Gln²⁸-exendin-4 (SEQ ID NO: 3177); octylGly¹⁴,Gln²⁸-exendin-4 (SEQ ID NO: 3178); Leu¹⁴,Gln²¹,octylGly³⁴-exendin-4 (SEQ ID NO: 3179); Phe⁴,Leu¹⁴,Gln²⁸,Lys³³,Glu³⁴,Ile^{35,36},Ser³⁷-exendin-4(1-37) (SEQ ID NO: 3180); Phe⁴,Leu¹⁴,Lys^{17,20},Ala¹⁹,Glu²¹,Gln²⁸-exendin-4 (SEQ ID NO: 3181); Val¹¹,Ile¹³,Leu¹⁴,Ala¹⁶,Lys²¹,Phe²⁵-exendin-4 (SEQ ID NO: 3182); exendin-4-Lys⁴⁰ (SEQ ID NO: 3183); lixisenatide (Sanofi-Aventis/Zealand Pharma); CJC-1134 (ConjuChem, Inc.); [N^{e}-(17-carboxyheptadecanoic acid)Lys²⁰]exendin-4-NH₂ (SEQ ID NO: 3208); [N^{e}-(17-carboxyhepta-decanoyl)Lys³²]exendin-4-NH₂ (SEQ ID NO: 3209); [desamino-His¹,N^{e}-(17-carboxyheptadecanoyl)Lys²⁰]exendin-4-NH₂(SEQ TD NO: 3210); [Arg^{12,27},NLe¹⁴,N^{e}-(17-carboxy-heptadecanoyl)Lys³²]exendin-4-NH₂ (SEQ ID NO: 3211); [N^{e}-(19-carboxy-nonadecanoylamino)Lys²⁰]-exendin-4-NH₂(SEQ ID NO: 3212); [N^{e}-(15-carboxypentadecanoylamino)Lys²⁰]-exendin-4-NH₂(SEQ ID NO: 3213); [N^{e}-(13-carboxytridecanoylamino)Lys²⁰]exendin-4-NH₂ (SEQ ID NO: 3214); [N^{e}-(11-carboxy-undecanoyl-amino)Lys²⁰]exendin-4-NH₂ (SEQ ID NO: 3215); exendin-4-Lys⁴⁰(e-MPA)-NH₂ (SEQ ID NO: 3216); exendin-4-Lys⁴⁰(e-AEEA-AEEA-MPA)-NH₂ (SEQ ID NO: 3217); exendin-4-Lys⁴⁰(e-AEEA-MPA)-NH₂(SEQ TD NO: 3218); exendin-4-Lys⁴⁰(e-MPA)-albumin (SEQ ID NO: 3219); exendin-4-Lys⁴⁰(e-AEEA-AEEA-PA)-albumin (SEQ ID NO: 3220), exendin-4-Lys⁴⁰(e-AEEA-MPA)-albumin (SEQ ID NO: 3221); and the like. AEEA refers to [2-(2-amino)ethoxy)]acetic acid. EDA refers to ethylenediamine. MPA refers to maleimidopropionic acid. The exendins and exendin analogs may optionally be amidated.

[0347] In one embodiment, the GLP-1 receptor agonist compound is an exendin-4 analog that has at least 80% sequence identity to exendin-4 (SEQ ID NO: 3163); at least 85% sequence identity to exendin-4 (SEQ ID NO: 3163); at least 90% sequence identity to exendin-4 (SEQ ID NO: 3163); or at least 95% sequence identity to exendin-4 (SEQ ID NO: 3163).

[0348] Other exendins and exendin analogs useful in the methods described herein include those described in WO 98/05351; WO 99/07404; WO 99/25727; WO 99/25728; WO 99/40788; WO 00/41546; WO 00/41548; WO 00/73331; WO 01/51078; WO 03/099314; U.S. Pat. Nos. 6,956,026; 6,506,724; 6,703,359; 6,858,576; 6,872,700; 6,902,744; 7,157,555; 7,223,725; 7,220,721; US Publication No. 2003/0036504; and US Publication No. 2006/0094652, the disclosures of which are incorporated by reference herein in their entirety.

[0349] “GLP-1(7-37) analogs” refers to peptides which elicit a biological activity similar to that of GLP-1(7-37), when evaluated by art-known measures such as receptor binding assays or in vivo blood glucose assays as described, e.g., by Hargrove et al., Regulatory Peptides, 141:113-119 (2007), the disclosure of which is incorporated by reference herein. In one embodiment, the term “GLP-1(7-37) analog” refers to a peptide that has an amino acid sequence with 1, 2, 3, 4, 5, 6, 7 or 8 amino acid substitutions, insertions, deletions, or a combination of two or more thereof, when compared to the amino acid sequence of GLP-1(7-37). In one embodiment, the GLP-1(7-37) analog is GLP-1(7-36)-NH₂. GLP-1(7-37) analogs include the amidated forms, the acid form, the pharmaceutically acceptable salt form, and any other physiologically active form of the molecule. In some embodiments a simple nomenclature is used to describe the GLP-1 receptor agonist, e.g., [Aib8]GLP-1 (7-37) designates an analogue of GLP-1(7-37) wherein the naturally occurring Ala in position 8 has been substituted with Aib.

[0350] Exemplary GLP-1(7-37) and GLP-1(7-37) analogs include GLP-1(7-37) (SEQ ID NO: 3184): GLP-1(7-36)-NH₂ (SEQ ID NO: 3185); liraglutide (VICTOZA® from Novo Nordisk); albiglutide (SYNCRIA® from GlaxoSmithKline); taspogluticde (Hoffman La-Roche); dulaglutide (also known LY2189265; Eli Lilly and Company); LY2428757 (Eli Lilly and Company); desamino-His⁷,Arg²⁶,Lys³⁴(N^{ε}-(γ-Glu(N-α-hexadecanoyl)))-GLP-1(7-37) (core peptide disclosed as SEQ ID NO: 3222), desamino-His⁷,Arg²⁶,Lys³⁴(N^{ε}-octanoyl)-GLP-1(7-37) (SEQ ID NO: 3223); Arg^{26,34},Lys³(N^{ε}-(ω-carboxypentadecanoyl))-GLP-1(7-38) (SEQ ID NO: 3224); Arg^{26,34},Lys³⁶(N^{ε}-(γ-Glu(N-α-hexadecanoyl))-GLP-1(7-36) (core peptide disclosed as SEQ ID NO: 3225); Aib^{8,35},Arg^{26,34},Phe³¹-GLP-1(7-36)) (SEQ ID NO: 3186); HXaa₈EGTFTSDVSSYLEXaa₂₂Xaa₂₃AAKEFTXaa₃₀WLXaa₃₃Xaa₃₄G Xaa₃₆Xaa₃₇; wherein Xaa₃ is A, V, or G; Xaa₂₂ is G, K, or E Xaa₂₃ is Q or K; Xaa₃₀ is A or E; Xaa₃₃ is V or K; Xaa₃₄ is K, N, or R; Xaa₃₆ is R or G; and Xaa₃₇ is G, H, P, or absent (SEQ ID NO: 3187); Arg³⁴-GLP-1(7-37) (SEQ ID NO: 3188); Glu³⁰-GLP-1(7-37) (SEQ ID NO: 3189); Lys²²-GLP-1(7-37) (SEQ ID NO: 3190); Gly^{8,36}Glu²²-GLP-1(7-37) (SEQ ID NO: 3191); Val⁸,Glu²²,Gly³⁶-GLP-1(7-37) (SEQ ID) NO: 3192); Gly^{8,36},Glu²²,Lys³³,Asn³⁴-GLP-1(7-37) (SEQ ID NO: 3193); Val⁸,Glu²²,Lys³³,Asn³⁴,Gly³⁶-GLP-1(7-37) (SEQ ID NO: 3194); Gly^{8,36},Glu²²,Pro³⁷-GLP-1(7-37) (SEQ ID NO: 3195); Val⁸,Gly²²,Gly³⁶,Gly³⁶,Pro³⁷-GLP-1(7-37) (SEQ ID NO: 3196); Gly^{8,36},Glu²²,Lys³³,Asn³⁴,Pro³⁷-GLP-1(7-37) (SEQ ID NO: 3197); Val⁸,Glu²²,Lys³³,Asn³⁴,Gly³⁶,Pro³⁷-GLP-1(7-37) (SEQ ID NO: 3198); Gly^{8,36},Glu²²-GLP-1(7-36) (SEQ ID NO: 3199); Val⁸,Glu²²,Gly³⁶-GLP-1(7-36) (SEQ ID NO: 3200); Val⁸,Glu²²,Asn³⁴,Gly³⁶-GLP-1(7-36) (SEQ ID NO: 3201); Gly^{8,36},Glu²²,Asn³⁴-GLP-1(7-36) (SEQ ID NO: 3202). Each of the GLP-1(7-37) and GLP-1(7-37) analogs may optionally be amidated.

[0351] The GLP-1 receptor agonists of the inventive composition of matter can also be chemically derivatized at one or more amino acid residues by known organic chemistry techniques. “Chemical derivative” or “chemically derivatized” refers to a subject peptide having one or more residues chemically derivatized by reaction of a functional side group. Such derivatized molecules include, for example, those molecules in which free amino groups have been derivatized to form amine hydrochlorides, p-toluene sulfonyl groups, carbobenzoxy groups, t-butyloxycarbonyl groups, chloroacetyl groups or formyl groups. Free carboxyl groups may be derivatized to form salts, methyl and ethyl esters or other types of esters or hydrazides. Free hydroxyl groups may be derivatized to form O-acyl or O-alkyl derivatives. The imidazole nitrogen of histidine may be derivatized to form N-im-benzylhistidine. Also included as chemical derivatives are those peptides which contain one or more naturally occurring amino acid derivatives of the twenty canonical amino acids, whether in L- or D-form. For example, 4-hydroxyproline may be substituted for proline; 5-hydroxylysine maybe substituted for lysine; 3-methylhistidine may be substituted for histidine; homoserine may be substituted for serine; and ornithine may be substituted for lysine.

[0352] Useful derivatizations include, in some embodiments, those in which the amino terminal of the peptide is chemically blocked so that conjugation with the vehicle will be prevented from taking place at an N-terminal free amino group. There may also be other beneficial effects of such a modification, for example a reduction in the toxin peptide analog's susceptibility to enzymatic proteolysis. The N-terminus can be acylated or modified to a substituted amine, or derivatized with another functional group, such as an aromatic moiety (e.g., an indole acid, benzyl (Bzl or Bn), dibenzyl (DiBzl or Bn₂), or benzyloxycarbonyl (Cbz or Z)), N,N-dimethylglycine or creatine. For example, in some embodiments, an acyl moiety, such as, but not limited to, a formyl, acetyl (Ac), propanoyl, butanyl, heptanyl, hexanoyl, octanoyl, or nonanoyl, can be covalently linked to the N-terminal end of the peptide, which can prevent undesired side reactions during conjugation of the vehicle to the peptide. Other exemplary N-terminal derivative groups include —NRR¹ (other than —NH₂), —NRC(O)R¹, —NRC(O)OR¹, —NRS(O)₂R¹, —NHC(O)NHR¹, succinimide, or benzyloxycarbonyl-NH-(Cbz-NH—), wherein R and R¹ are each independently hydrogen or lower alkyl and wherein the phenyl ring may be substituted with 1 to 3 substituents selected from C₁-C₄ alkyl, C₁-C₄ alkoxy, chloro, and bromo.

[0353] In some embodiments, one or more peptidyl [—C(O)NR—] linkages (bonds) between amino acid residues can be replaced by a non-peptidyl linkage. Exemplary non-peptidyl linkages are —CH₂-carbamate [—CH₂—OC(O)NR—], phosphonate, —CH₂-sulfonamide [—CH₂—S(O)₂NR—], urea [—NHC(O)NH—], —CH₂-secondary amine, and alkylated peptide [—C(O)NR⁶— wherein R⁶ is lower alkyl].

[0354] In some embodiments, one or more individual amino acid residues can be derivatized. Various derivatizing agents are known to react specifically with selected sidechains or terminal residues, as described in detail below by way of example.

[0355] Lysinyl residues and amino terminal residues may be reacted with succinic or other carboxylic acid anhydrides, which reverse the charge of the lysinyl residues. Other suitable reagents for derivatizing alpha-amino-containing residues include imidoesters such as methyl picolinimidate; pyridoxal phosphate; pyridoxal; chloroborohydride; trinitrobenzenesulfonic acid; O-methylisourea; 2,4 pentanedione; and transaminase-catalyzed reaction with glyoxylate.

[0356] Arginyl residues may be modified by reaction with any one or combination of several conventional reagents, including phenylglyoxal, 2,3-butanedione, 1,2-cyclohexanedione, and ninhydrin. Derivatization of arginyl residues requires that the reaction be performed in alkaline conditions because of the high pKa of the guanidine functional group. Furthermore, these reagents may react with the groups of lysine as well as the arginine epsilon-amino group.

[0357] Specific modification of tyrosyl residues has been studied extensively, with particular interest in introducing spectral labels into tyrosyl residues by reaction with aromatic diazonium compounds or tetranitromethane. Most commonly, N-acetylimidizole and tetranitromethane are used to form O-acetyl tyrosyl species and 3-nitro derivatives, respectively.

[0358] Carboxyl sidechain groups (aspartyl or glutamyl) may be selectively modified by reaction with carbodiimides (R′—N═C═N—R′) such as 1-cyclohexyl-3-(2-morpholinyl-(4-ethyl) carbodiimide or 1-ethyl-3-(4-azonia-4,4-dimethylpentyl) carbodiimide. Furthermore, aspartyl and glutamyl residues may be converted to asparaginyl and glutaminyl residues by reaction with ammonium ions.

[0359] Glutaminyl and asparaginyl residues may be deamidated to the corresponding glutamyl and aspartyl residues. Alternatively, these residues are deamidated under mildly acidic conditions. Either form of these residues falls within the scope of this invention.

[0360] Cysteinyl residues can be replaced by amino acid residues or other moieties either to eliminate disulfide bonding or, conversely, to stabilize cross-linking. (See, e.g., Bhatnagar et al., J. Med. Chem., 39:3814-3819 (1996)).

[0361] Other possible modifications include hydroxylation of proline and lysine, phosphorylation of hydroxyl groups of seryl or threonyl residues, oxidation of the sulfur atom in Cys, methylation of the alpha-amino groups of lysine, arginine, and histidine side chains. Creighton, Proteins: Structure and Molecule Properties (W. H. Freeman & Co., San Francisco), 79-86 (1983).

[0362] The above examples of derivatizations are not intended to be an exhaustive treatment, but merely illustrative

[0363] In one embodiment, the GLP-(7-37) or GLP-1 (7-37) analogs are covalently linked (directly or by a linking group) to an Fc portion of an immunoglobulin (e.g., IgG, IgE, IgG, and the like). For example, any one of SEQ ID NOs:25-40 may be covalently linked to the Fc portion of an immunoglobulin comprising the sequence of: AESKYGPPCPPCPAPXaa₁₆Xaa₁₇Xaa₁₈GGPSVFLFPPKPKDTLMISRTPEVTCVVVDVSQ EDPEVQFNWYVDGVEVHNAKTKPREEQFXaaXoSTYRVVSVLTVLHQDWLNGKEYK CKVSNKGL PSSIEKTISKAKGQPREPQVtYTLPPSQEEMTKNQVSLTCLVKGFYPSDIA VEWESNGQPENNYKTTPPVLDSDGSFFLYSRLTVDKSRWQEGNVFSCSVMHEALHN HYTQKSLSLSLGXaa₂₃₀; wherein Xaa₁₆ is P or E; Xaa₁₇ is F, V or A; Xaa₁₈ is L, E or A; Xaa₈₀ is N or A; and Xaa₂₃₀ is K or absent (SEQ ID NO: 3203). The linking group may be any chemical moiety (e.g., amino acids and/or chemical groups). In one embodiment, the linking group is (-GGGGS-)ₓ (SEQ ID NO: 3204) where x is 1, 2, 3, 4, 5 or 6; preferably 2, 3 or 4; more preferably 3. In one embodiment, the GLP-1(7-37) analog covalently linked to the Fe portion of an immunoglobulin comprises the amino acid sequence:

(SEQ ID NO: 3205)
HGEGTFTSDVSSYLEEQAAKEFIAWLVKGGGGGGGSGGGGSGGGGSAES
KYGPPCPPCPAPEAAGGPSVFLFPPKPKDTLMISRTPEVTCVVVDVSQE
DPEVQFNWYVDGVEVHNAKTKPREEQFNSTYRVVSVLTVLHQDWLNGKE
YKCKVSNKGLPSSIEKTISKAKGQPREPQVYTLPPSQEEMTKNQVSLTC
LVKGFYPSDIAVEWESNGQPENNYKTTPPVLDSDGSFFLYSRLTVDKSR
WQEGNVFSCSVMHEALHNHYTQKSLSLSLG.

[0364] In another embodiment, the GLP-1(7-37) or GLP-1(7-37) analog may be covalently linked (directly or through a linking group) to one or two polyethylene glycol molecules. For example, a GLP-1(7-37) analog may comprise the amino acid sequence: HXaasEGTFTSDVS SYLEXaa₂₂QAAKEFIAWLXaa₃₃KGCiPSSCiAPPPC₄₅C₄₆-Z, wherein Xaa₈ is: D-Ala, G, V, L, I, S or T; Xaa₂₂ is G, E, D or K; Xaa₃₃ is: V or I; and Z is OH or NH₂, (SEQ ID NO: 3206), and, optionally. wherein (i) one polyethylene glycol moiety is covalently attached to C₄₅, (ii) one polyethylene glycol moiety is covalently attached to C₄₆, or (iii) one polyethylene glycol moiety is attached to C₄₅ and one polyethylene glycol moiety is attached to C₄₆. In one embodiment, the GLP-1(7-37) analog is HVEGTFTSDVSSYLEEQAAKEFI AWLIKGGPSSGAPPPC₄₅C₄₆—NH₂ (SEQ ID NO: 3207) and, optionally, wherein (i) one polyethylene glycol moiety is covalently attached to C₄, (ii) one polyethylene gly col moiety is covalently attached to C₄₆, or (iii) one polyethylene glycol moiety is attached to C₄₅ and one polyethylene glycol moiety is attached to C₄₆.

[0365] GLP-1 receptor agonist amino acid residues that can provide a primary amine moiety for conjugation include residues of lysine, homolysine, omithine, α,β-diaminopropionic acid (Dap), α,β-diaminopropionoic acid (Dpr), and α,γ-diaminobutyric acid (Dab), aminobutyric acid (Abu), and α-amino-isobutyric acid (Aib). The polypeptide N-terminus also provides a useful α-amino group for conjugation as does an amidated polypeptide C-terminus. In certain embodiments, the GLP-1(7-37) or GLP-1(7-37) analog is conjugated to the antibody or fragment thereof at a residue that corresponds to K26 (position 20 of SEQ ID NO: 3184), K34 (position 28 of SEQ ID NO: 3184), K36 (position 30 of SEQ ID NO: 3184; e.g., via a R36K mutation), K37 (position 31 of SEQ ID NO: 3184; e.g., via a G37K mutation), K39 (e.g., via addition of two amino acids to the GLP-1(7-37) or GLP-1(7-37) analog with lysine at position 39) or a C-terminal amine group of said analog. Amino acid residues that can provide a secondary amine moiety include ε-N-alkyl lysine, α-N-alkyl lysine, δ-N-alkyl ornithine, α-N-alkyl ornithine, or an N-terminal proline, where the alkyl is C₁ to C₆.

[0366] A “linker moiety” as used herein refers to a biologically acceptable peptidyl or non-peptidyl organic group that is covalently bound to an amino acid residue of a toxin peptide analog or other polypeptide chain (e.g., an immunoglobulin HC or LC or immunoglobulin Fc domain) contained in the inventive composition, which linker moiety covalently joins or conjugates the toxin peptide analog or other polypeptide chain to another peptide or polypeptide chain in the composition, or to a half-life extending moiety. In some embodiments of the composition, a half-life extending moiety, as described herein, is conjugated, i.e., covalently bound directly to an amino acid residue of the toxin peptide analog itself, or optionally, to a peptidyl or non-peptidyl linker moiety (including but not limited to aromatic or aryl linkers) that is covalently bound to an amino acid residue of the toxin peptide analog. The presence of any linker moiety is optional. When present, its chemical structure is not critical, since it serves primarily as a spacer to position, join, connect, or optimize presentation or position of one functional moiety in relation to one or more other functional moieties of a molecule of the inventive composition. The presence of a linker moiety can be useful in optimizing pharmacological activity of some embodiments of the inventive composition. The linker, if present, can be made up of amino acids linked together by peptide bonds. The linker moiety, if present, can be independently the same or different from any other linker, or linkers, that may be present in the inventive composition. In some embodiments the linker can be a multivalent linker that facilitates multivalent display of toxin peptide analogs of the present invention; multivalent display of such biologically active compounds can increase binding affinity and/or potency through avidity. The in vivo properties of a therapeutic can be altered (i.e., specific targeting, half-life extension, distribution profile, etc.) through conjugation to a polymer or protein.

[0367] Peptidyl linkers. As stated above, the linker moiety, if present (whether within the primary amino acid sequence of the toxin peptide analog, or as a linker for attaching a half-life extending moiety to the toxin peptide analog), can be “peptidyl” in nature (i.e., made up of amino acids linked together by peptide bonds) and made up in length, preferably, of from 1 up to about 40 amino acid residues, more preferably, of from 1 up to about 20 amino acid residues, and most preferably of from 1 to about 10 amino acid residues. Preferably, but not necessarily, the amino acid residues in the linker are from among the twenty canonical amino acids, more preferably, cysteine, glycine, alanine, proline, asparagine, glutamine, and/or serine. Even more preferably, a peptidyl linker is made up of a majority of amino acids that are sterically unhindered, such as glycine, serine, and alanine linked by a peptide bond. It is also desirable that, if present, a peptidyl linker be selected that avoids rapid proteolytic turnover in circulation in vivo. Some of these amino acids may be glycosylated, as is well understood by those in the art. For example, a useful linker sequence constituting a sialylation site is X₁X₂NX₄X₅G (SEQ ID NO: 3250), wherein X₁, X₂, X₄ and X₅ are each independently any amino acid residue.

[0368] In other embodiments, the 1 to 40 amino acids of the peptidyl linker moiety are selected from glycine, alanine, proline, asparagine, glutamine, and lysine. Preferably, a linker is made up of a majority of amino acids that are sterically unhindered, such as glycine and alanine. Thus, preferred linkers include polyglycines, polyserines, and polyalanines, or combinations of any of these. Some exemplary peptidyl linkers are poly(Gly)₁₋₈, particularly (Gly)₃ (SEQ ID NO:3251), (Gly)₄ (SEQ ID NO:480), (Gly)₅ (SEQ ID NO:3251) and (Gly)₇ (SEQ ID NO:3252), as well as, GlySer and poly(Gly)₄Ser, such as “L15” (GGGGSGGGGSGGGGS; SEQ ID NO:3253), poly(Gly-Ala)₂₋₄ and poly(Ala)₁₋₈. Other specific examples of peptidyl linkers include (Gly)₅Lys (SEQ ID NO:3254), and (Gly)₅LysArg (SEQ ID NO:3255). Other examples of useful peptidyl linkers are: Other examples of useful peptidyl linkers are:

(SEQ ID NO: 3256)
(Gly)₃Lys(Gly)₄;
(SEQ ID NO: 3257)
(Gly)₃AsnGlySer(Gly)₂;
(SEQ ID NO: 3258)
(Gly)₃Cys(Gly)₄;
and
(SEQ ID NO: 3259)
GlyProAsnGlyGly

[0369] To explain the above nomenclature, for example, (Gly)₃Lys(Gly)₄ means Gly-Gly-Gly-Lys-Gly-Gly-Gly-Gly (SEQ ID NO:3260). Other combinations of Gly and Ala are also useful.

[0370] Other preferred linkers are those identified herein as “L5” (GGGGS; or “G₄S”; SEQ ID NO:3261), “L10” (GGGGSGGGGS; SEQ ID NO:3262); “L20” (GGGGSGGGGSGGGGSGGGGS; SEQ ID NO:3263); “L25” (GGGGSGGGGSGGGGSGGGGSGGGGS; SEQ ID NO: 3264) and any linkers used in the working examples hereinafter.

[0371] In some embodiments of the compositions of this invention, which comprise a peptide linker moiety, acidic residues, for example, glutamate or aspartate residues, are placed in the amino acid sequence of the linker moiety. Examples include the following peptide linker sequences:

(SEQ ID NO: 3265)
GGEGGG;
(SEQ ID NO: 3266)
GGEEEGGG;
(SEQ ID NO: 3267)
GEEEG;
(SEQ ID NO: 3268)
GEEE;
(SEQ ID NO: 3269)
GGDGGG;
(SEQ ID NO: 3270)
GGDDDGG;
(SEQ ID NO: 3271)
GDDDG;
(SEQ ID NO: 3272)
GDDD;
(SEQ ID NO: 3273)
GGGGSDDSDEGSDGEDGGGGS;
(SEQ ID NO: 3274)
WEWEW;
(SEQ ID NO: 3275)
FEFEF;
(SEQ ID NO: 3276)
EEEWWW;
(SEQ ID NO: 3277)
EEEFFF;
(SEQ ID NO: 3278)
WWEEEWW;
or
(SEQ ID NO: 3279)
FFEEEFF.

[0372] In other embodiments, the linker constitutes a phosphorylation site, e.g., X₁X₂YX₄X₅G (SEQ ID NO:3280), wherein X₁, X₂, X₄, and X₅ are each independently any amino acid residue; X₁X₂SX₄X₅G (SEQ ID NO:3281), wherein X₁, X₂,X₄ and X₅ are each independently any amino acid residue; or X₁X₂TX₄X₅G (SEQ ID NO:3282), wherein X₁, X₂, X₄ and X₅ are each independently any amino acid residue.

[0373] The linkers shown here are exemplary; peptidyl linkers within the scope of this invention may be much longer and may include other residues. A peptidyl linker can contain, e.g., a cysteine, another thiol, or nucleophile for conjugation with a half-life extending moiety. In another embodiment, the linker contains a cysteine or homocysteine residue, or other 2-amino-ethanethiol or 3-amino-propanethiol moiety for conjugation to maleimide, iodoacetaamide or thioester, functionalized half-life extending moiety.

[0374] Another useful peptidyl linker is a large, flexible linker comprising a random Gly/Ser/Thr sequence, for example: GSGSATGGSGSTASSGSGSATH (SEQ ID NO:3283) or HGSGSATGGSGSTASSGSGSAT (SEQ ID NO:3284), that is estimated to be about the size of a 1 kDa PEG molecule. Alternatively, a useful peptidyl linker may be comprised of amino acid sequences known in the art to form rigid helical structures (e.g., Rigid linker: -AEAAAKEAAAKEAAAKAGG-//SEQ ID NO:3285). Additionally, a peptidyl linker can also comprise a non-peptidyl segment such as a 6 carbon aliphatic molecule of the formula —CH₂—CH₂—CH₂—CH₂—CH₂—CH₂—. The peptidyl linkers can be altered to form derivatives as described herein.

[0375] Non-peptidyl linkers. Optionally, a non-peptidyl linker moiety is also useful for conjugating the half-life extending moiety to the peptide portion of the half-life extending moiety-conjugated toxin peptide analog. For example, alkyl linkers such as —NH—(CH₂)ₛ—C(O)—, wherein s=2-20 can be used. These alkyl linkers may further be substituted by any non-sterically hindering group such as lower alkyl (e.g., C₁-C₆) lower acyl, halogen (e.g., Cl, Br), CN, NH₂, phenyl, etc. Exemplary non-peptidyl linkers are PEG linkers (e.g., shown below):

[chemical structure]

[0376] wherein n is such that the linker has a molecular weight of about 100 to about 5000 Daltons (Da), preferably about 100 to about 500 Da.

[0377] In one embodiment, the non-peptidyl linker is aryl. The linkers may be altered to form derivatives in the same manner as described herein. “Aryl” is phenyl or phenyl vicinally-fused with a saturated, partially-saturated, or unsaturated 3-, 4-, or 5 membered carbon bridge, the phenyl or bridge being substituted by 0, 1, 2 or 3 substituents selected from C₁₋₈ alkyl, C14 haloalkyl or halo. “Heteroaryl” is an unsaturated 5, 6 or 7 membered monocyclic or partially-saturated or unsaturated 6-, 7-, 8-, 9-, 10- or 11 membered bicyclic ring, wherein at least one ring is unsaturated, the monocyclic and the bicyclic rings containing 1, 2, 3 or 4 atoms selected from N, O and S, wherein the ring is substituted by 0, 1, 2 or 3 substituents selected from C₁₋₈ alkyl, C₁₋₄ haloalkyl and halo.

[0378] Non-peptide portions of the inventive composition of matter, such as non-peptidyl linkers or non-peptide half-life extending moieties can be synthesized by conventional organic chemistry reactions.

[0379] Other embodiments of the multivalent linker comprise a rigid polyheterocyclic core of controlled length. The linkers are chemically differentiated on either end to accommodate orthogonal coupling chemistries (i.e. azide “Click”, amide coupling, thioether formation by alkylation with maleimide or haloacetamide, oxime formation, reductive amination, etc.).

[0380] The above is merely illustrative and not an exhaustive treatment of the kinds of linkers that can optionally be employed in accordance with the present invention.

[0381] In one embodiment, the GLP-1 receptor agonist compound is a peptide that has at least 80% sequence identity to GLP-1(7-37) (SEQ ID NO: 3184); at least 85% sequence identity to GLP-1(7-37) (SEQ ID NO: 3184); at least 90% sequence identity to GLP-1(7-37) (SEQ ID NO: 3184); or at least 95% sequence identity to GLP-1(7-37) (SEQ ID NO: 3184).

[0382] GLP-1 receptor agonist compounds may be prepared by processes well known in the art, e.g., peptide purification as described in Eng et al., J Biol. Chem., 265:20259-62 (1990); standard solid-phase peptide synthesis techniques as described in Raufman et al., J. Biol. Chem., 267:21432-37 (1992); recombinant DNA techniques as described in Sambrook et al., Molecular Cloning: A Laboratory Manual, 2d Ed., Cold Spring Harbor (1989); and the like.

TABLE 7
Examples of GLP-1 receptor agonist Sequences

| SEQ ID NO: | Sequence | Description |
|---|---|---|
| 3163 | HGEGTFTSDLSKQMEEEAVRLFIEWLKN | Exendin-4 |
| | GGPSSGAPPPS | |
| 3164 | HSDGTFTSDLSKQMEEEAVRLFIEWLKN | Exendin-3 |
| | GGPSSGAPPPS | |
| 3165 | HGEGTFTSDLSKQLEEEAVRLFIEWLKN | Leu¹⁴-exendin-4 |
| | GGPSSGAPPPS | |
| 3166 | HGEGTFTSDLSKQLEEEAVRLFIEFLKN | Leu¹⁴, Phe²⁵-exendin-4 |
| | GGPSSGAPPPS | |
| 3167 | HGEGTFTSDLSKQLEEEAARLFIEFLKN | Leu¹⁴, Ala¹⁹, Phe25-exendin-4 |
| | GGPSSGAPPPS | |
| 3168 | HGEGTFTSDLSKQMEEEAVRLFIEWLKN | exendin-4(1-30) |
| | GG | |
| 3169 | HGEGTFTSDLSKQLEEEAVRLFIEWLKN | Leu¹⁴-exendin-4(1-30) |
| | GG | |
| 3170 | HGEGTFTSDLSKQLEEEAVRLFIEFLKN | Leu¹⁴, Phe²⁵-exendin-4(1-30) |
| | GG | |
| 3171 | HGEGTFTSDLSKQLEEEAARLFIEFLKN | Leu¹⁴, Ala¹⁹, Phe²⁵-exendin-4(1-30) |
| | GG | |
| 3172 | HGEGTFTSDLSKQMEEEAVRLFIEWLKN | exendin-4(1-28) |
| 3173 | HGEGTFTSDLSKQLEEEAVRLFIEWLKN | Leu¹⁴-exendin-4(1-28) |
| 3174 | HGEGTFTSDLSKQLEEEAVRLFIEFLKN | Leu¹⁴, Phe25-exendin-4(1-28) |
| 3175 | HGEGTFTSDLSKQLEEEAARLFIEFLKN | Leu¹⁴, Ala¹⁹ Phe²⁵-exendin-4(1-28) |
| 3176 | HGEGTFTSDLSKQLEEKAAKEFIEFLKQ | Leu¹⁴, Lys^{17,20}, Ala¹⁹, Glu²¹, Phe²⁵, |
| | GGPSSGAPPPS | Gln²⁸-exendin-4 |
| 3177 | HGEGTFTSDLSKQLEEKAAKEFIEWLKQ | Leu¹⁴, Lys^{17,20}, Ala¹⁰, Glu²¹, Gln²⁸- |
| | GGPSSGAPPPS | exendin-4 |
| 3178 | HGEGTFTSDLSKQ(octylG)EEEAVRL | octylGly¹⁴, Gln²⁸-exendin-4 |
| | FIEWLKQGGPSSGAPPPS | |
| 3179 | HGEGTFTSDLSKQLEEEAVRLFIEWLKQ | Leu¹⁴, Gln²⁸, octylGly³⁴-exendin-4 |
| | GGPSS(octylG)APPPS | |
| 3180 | HGEFTFTSDLSKQLEEEAVRLFIEWLKQ | Phe⁴, Leu¹⁴, Gln²⁸, Lys³³, Glu³⁴, |
| | GGPSKEIIS | Ile^{35,36} Ser³⁷-exendin-4(1-37) |
| 3181 | HGEFTFTSDLSKQLEEKAAKEFIEWLKQ | Phe⁴,Leu¹⁴, Lys^{17,20}, Ala¹⁹, Glu²¹, |
| | GGPSSGAPPPS | Gln²⁸-exendin-4 |
| 3182 | HGEGTFTSDLVKILEAEAVRKFIEFLKN | Val¹¹, Ile¹³, Leu¹⁴, Ala¹⁶, Lys²¹, Phe²³- |
| | GGPSSGAPPPS | exendin-4 |
| 3183 | HGEGTFTSDLSKQMEEEAVRLFIEWLKN | exendin-4-Lys40 |
| | GGPSSGAPPPSK | |
| 3184 | HAEGTFTSDVSSYLEGQAAKEFIAWLVK | GLP-1(7-37) |
| | GRG | |
| 3185 | HAEGTFTSDVSSYLEGQAAKEFIAWLVK | GLP-1(7-36)-NH₂ |
| | GR | |
| 3186 | H(Aib)EGTFTSDVSSYLEGQAAREFIA | Aib^{8,35}, Arg^{26,34}, Phe³¹-GLP-1(7-36)) |
| | FLVR(Aib)R | |
| 3187 | HXaa₈EGTFTSDVSSYLEXaa₂₂Xaa₂₃AA | HXaa⁸EGTFTSDVSSYLEXaa²²Xaa²³ |
| | KEFI | AAKEFIXaa³⁰WLXaa³³Xaa³⁴ |
| | Xaa₃₀WLXaa₃₃Xaa₃₄GXaa₃₆Xaa₃₇ | GXaa³⁶Xaa³⁷ |
| | wherein Xaa₈ is A, V, or G | wherein Xaa₈ is A, V, or G |
| | Xaa₂₂ is G, K, or E | Xaa₂₂ is G, K, or E |
| | Xaa₂₃ is Q or K | Xaa₂₃ is Q or K |
| | Xaa₃₀ is A or E Xaa₃₃ is V or K | Xaa₃₀ is A or E |
| | Xaa₃₄ is K, N, or R | Xaa₃₃ is V or K |
| | Xaa₃₆ is R or G | Xaa₃₄ is K, N, or R |
| | and Xaa₃₇ is G, H, P, or | Xaa₃₆ is R or G |
| | absent | and Xaa₃₇ is G, H, P, or absent |
| 3188 | HAEGTFTSDVSSYLEGQAAKEFIAWLVR | Arg³⁴-GLP-1(7-37) |
| | GRG | |
| 3189 | HAEGTFTSDVSSYLEGQAAKEFIEWLVK | Glu³⁰-GLP-1(7-37) |
| | GRG | |
| 3190 | HAEGTFTSDVSSYLEKQAAKEFIAWLVK | Lys²²-GLP-1(7-37) |
| | GRG | |
| 3191 | HGEGTFTSDVSSYLEEQAAKEFIAWLVK | Gly^{8,36}, Glu²²-GLP-1(7-37) |
| | GGG | |
| 3192 | HVEGTFTSDVSSYLEEQAAKEFIAWLVK | Val⁸, Glu²², Gly³⁶-GLP-1(7-37) |
| | GGG | |
| 3193 | HGEGTFTSDVSSYLEEQAAKEFIAWLKN | Gly^{8,36}, Glu²², Lys³³, Asn³⁴-GLP- |
| | GGG | 1(7-37) |
| 3194 | HVEGTFTSDVSSYLEEQAAKEFIAWLKN | Val⁸, Glu²², Lys³³, Asn³⁴, Gly³⁶, |
| | GGG | GLP-1(7-37) |
| 3195 | HGEGTFTSDVSSYLEEQAAKEFIAWLVK | Gly^{8,36}, Glu²², Pro³⁷-GLP-1(7-37) |
| | GGP | |
| 3196 | HVEGTFTSDVSSYLEEQAAKEFIAWLVK | Val⁸, Glu²², Gly³⁶, Pro³⁷-GLP-1(7-37) |
| | GGP | |
| 3197 | HGEGTFTSDVSSYLEEQAAKEFIAWLKN | Gly^{8,36}, Glu²², Lys³³, Asn³⁴, Pro³⁷, |
| | GGP | GLP-1(7-37) |
| 3198 | HVEGTFTSDVSSYLEEQAAKEFIAWLKN | Val³, Glu²², Lys³³, Asn³⁴, Gly³⁶, Pro³⁷- |
| | GGP | GLP-1(7-37) |
| 3199 | HGEGTFTSDVSSYLEEQAAKEFIAWLVK | Gly^{8,36}, Glu²²-GLP-1(7-36) |
| | GG | |
| 3200 | HVEGTFTSDVSSYLEEQAAKEFIAWLVK | Val⁸, Glu²², Gly³⁶-GLP-1(7-36) |
| | GG | |
| 3201 | HVEGTFTSDVSSYLEEQAAKEFIAWLVN | Val⁸, Glu²², Asn³⁴, Gly³⁶-GLP-1(7-36) |
| | GG | |
| 3202 | HGEGTFTSDVSSYLEEQAAKEFIAWLVN | Gly^{8,36}, Glu²², Asn³⁴-GLP-1(7-36) |
| | GG | |
| 3203 | AESKYGPPCPPCPAPXaa₁₆Xaa₁₇Xaa₁₈ | Fc portion of an immunoglobulin |
| | GGPSVFLFPPKPKDTLMISRTPEVTCVV | |
| | VDVSQEDPEVQFNWYVDGVEVHNAKTKP | |
| | REEQFXaa₈₀STYRVVSVLTVLHQDWLNG | |
| | KEYKCKVSNKGLPSSIEKTISKAKGQPR | |
| | EPQVYTLPPSQEEMTKNQVSLTCLVKGF | |
| | YPSDIAVEWESNGQPENNYKTTPPVLDS | |
| | DGSFFLYSRLTVDKSRWQEGNVFSCSVM | |
| | HEALHNHYTQKSLSLSLGXaa₂₃₀ | |
| | wherein Xaa₁₆ is P or E | |
| | Xaa₁₇ is F, V or A | |
| | Xaa₁₈ is L, E or A | |
| | Xaa₈₀ is N or A | |
| | and Xaa₂₃₀ is K or absent | |
| 3204 | (-GGGGS-)ₓ where x is 1, 2, | Linker |
| | 3, 4, 5 or 6 | |
| 3205 | HGEGTFTSDVSSYLEEQAAKEFIAWLVK | Fc portion of an immunoglobulin |
| | GGGGGGGSGGGGSGGGGSAESKYGPPCP | |
| | PCPAPEAAGGPSVFLFPPKPKDTLMISR | |
| | TPEVTCVVVDVSQEDPEVQFNWYVDGVE | |
| | VHNAKTKPREEQFNSTYRVVSVLTVLHQ | |
| | DWLNGKEYKCKVSNKGIPSSIEKTISKA | |
| | KGQPREPQVYTIPPSQEEMTKNQVSLTC | |
| | LVKGFYPSDIAVEWESNGQPENNYKTTP | |
| | PVLDSDGSFFLYSR | |
| | LTVDKSRWQEGNVFSCSVMHEALHNHYT | |
| | QKSLSLSLG | |
| 3206 | HXaa₈EGTFTSDVS | GLP-1 analog |
| | SYLEXaa₂₂QAAKEFIAWLXaa₃₃KGGPSS | |
| | GAPPPC₄₅C₄₆-Z, wherein | |
| | Xaa₈ is: D-Ala, G, V, L, I, S | |
| | or T | |
| | Xaa₂₂ is G, E, D or K | |
| | Xaa₃₃ is: V or I | |
| | and Z is OH or NH₂ and, | |
| | optionally, wherein (i) one | |
| | polyethylene glycol moiety | |
| | is covalently attached to | |
| | C₄₅, (ii) one polyethylene | |
| | glycol moiety is covalently | |
| | attached to C₄₆, or (iii) one | |
| | polyethylene glycol moiety | |
| | is attached to C₄₅ and one | |
| | polyethylene glycol moiety | |
| | is attached to C₄₆. | |
| 3207 | HVEGTFTSDVSSYLEEQAAKEFIAWLIK | GLP-1 analog |
| | GGPSSGAPPPC₄₅C₄₆-NH₂ and, | |
| | optionally, wherein (i) one | |
| | polyethylene glycol moiety | |
| | is covalently attached to | |
| | C₄, (ii) one polyethylene | |
| | glycol moiety is covalently | |
| | attached to C₄₆, or (iii) one | |
| | polyethylene glycol moiety | |
| | is attached to C₄₅ and one | |
| | polyethylene glycol moiety | |
| | is attached to C₄₆ | |
| 3208 | HGEGTFTSDLSKQMEEEAVKLFIEWLKN | [N^{e}-(17-carboxyheptadecanoic |
| | GGPSSGAPPPS | acid)Lys²⁰]exendin-4-NH₂ |
| 3209 | HGEGTFTSDLSKQMEEEAVRLFIEWLKN | [N^{e}-(17-carboxyhepta- |
| | GGPKSGAPPPS | decanoyl)Lys³²]exendin-4-NH₂ |
| 3210 | GEGTFTSDLSKQMEEEAVKLFIEWLKNG | [desamino-His¹, N^{e}-(17- |
| | GPSSGAPPPS | carboxyheptadecanoyl)Lys²⁰] |
| | | exendin-4-NH₂ |
| 3211 | HGEGTFTSDLSRQNorLeEEEAVRLFIE | [Arg^{12,27}, NLe¹⁴, N^{e}-(17-carboxy- |
| | WLRNGGPKSGAPPPS | heptadecanoyl)Lys³²]exendin-4- |
| | | NH₂ |
| 3212 | HGEGTFTSDLSKQMEEEAVKLFIEWLKN | [N^{e}-(19-carboxy- |
| | GGPSSGAPPPS | nonadecanoylamino)Lys²⁰]- |
| | | exendin-4-NH₂ |
| 3213 | HGEGTFTSDLSKQMEEEAVKLFIEWLKN | [N^{e}-(15- |
| | GGPSSGAPPPS | carboxypentadecanoylamino)Lys²⁰]- |
| | | exendin-4-NH₂ |
| 3214 | HGEGTFTSDLSKQMEEEAVKLFIEWLKN | [N^{e}-(13- |
| | GGPSSGAPPPS | carboxytridecanoylamino)Lys²⁰] |
| | | exendin-4-NH₂ |
| 3215 | HGEGTFTSDLSKQMEEEAVKLFIEWLKN | [N^{e}-(11-carboxy-undecanoyl- |
| | GGPSSGAPPPS | amino)Lys²⁰]exendin-4-NH₂ |
| 3216 | HGEGTFTSDLSKQMEEEAVRLFIEWLKN | exendin-4-Lys⁴⁰(e-MPA)-NH₂ |
| | GGPSSGAPPPSK | |
| 3217 | HGEGTFTSDLSKQMEEEAVRLFIEWLKN | exendin-4-Lys⁴⁰(e-AEEA-AEEA- |
| | GGPSSGAPPPSK | MPA)-NH₂ |
| 3218 | HGEGTFTSDLSKQMEEEAVRLFIEWLKN | exendin-4-Lys⁴⁰(e-AEEA-MPA)- |
| | GGPSSGAPPPSK | NH₂ |
| 3219 | HGEGTFTSDLSKQMEEEAVRLFIEWLKN | exendin-4-Lys⁴⁰(e-MPA)-albumin |
| | GGPSSGAPPPSK | |
| 3220 | HGEGTFTSDLSKQMEEEAVRLFIEWLKN | exendin-4-Lys⁴⁰(e-AEEA-AEEA- |
| | GGPSSGAPPPSK | MPA)-albumin |
| 3221 | HGEGTFTSDLSKQMEEEAVRLFIEWLKN | exendin-4-Lys⁴⁰(e-AEEA-MPA)- |
| | GGPSSGAPPPSK | albumin |
| 3222 | AEGTFTSDVSSYLEGQAAREFIAWLVKG | desamino-His⁷, Arg²⁶, Lys³⁴(N^{ϵ}-(γ- |
| | RG | Glu(N-α-hexadecanoyl)))-GLP- |
| | | 1(7-37) (core peptide disclosed as |
| | | SEQ ID NO: 3222) |
| 3223 | AEGTFTSDVSSYLEGQAAREFIAWLVKG | desamino-His⁷, Arg²⁶, Lys³⁴(N^{ϵ}- |
| | RG | octanoyl)-GLP-1(7-37) |
| 3224 | HAEGTFTSDVSSYLEGQAAREFIAWLVR | Arg^{26,34}, Lys³⁸(N^{ϵ}-(ω)- |
| | GRGK | carboxypentadecanoyl))-GLP-1(7-38) |
| 3225 | HAEGTFTSDVSSYLEGQAAREFIAWLVR | Arg^{26,34}, Lys³⁶(N^{ϵ}-(γ-Glu(N-α- |
| | GRGK | hexadecanoyl)))-GLP-1(7-36) |
| | | (core peptide disclosed as SEQ ID |
| | | NO: 3225) |
| 3226 | H[Aib]EGTFTSDVSSYLEGQAAKEFIA | [Aib⁸; Lys³⁷]GLP-1_(7-37) |
| | WLVKGRK | |
| 3227 | H[Aib]EGTFTSDVSSYLEGQAAKEFIA | [Aib⁸, Lys³⁶]GLP-1_(7-37) |
| | WLVKGKG | |
| 3228 | H[Aib]EGTFTSDVSSYLE[Aib]QAAK | [Aib^{8,22}; Lys³⁶]GLP-1(7-36)- |
| | EFIAWLVKGK | Amide |
| 3229 | H[Aib]EGTFTSDVSSYLE[Aib]QAAK | [Aib^{8,22}, BLeu³²; Lys³⁶]GLP-1(7- |
| | EFIAW[BLeu]VKGK | 36)-Amide |
| 3230 | H[Aib]EGTFTSDVSSYLE[Aib]QAAK | [Aib^{8,22}, Lys³⁷]GLP-1(7-37)- |
| | EFIAWLVKGRK | Amide |
| 3231 | H[Aib]EGTFTSDVSSYLE[Aib]QAAK | [Aib^{8,22}, BLeu³²; Lys³⁷]GLP-1(7- |
| | EFIAW[BLeu]VKGRK | 37)-Amide |
| 3232 | H[Aib]EGTFTSDVSSYLE[Aib]QAAK | [Aib^{8,22}; aMeLeu³²; Lys³⁷]GLP-1(7- |
| | EFIAW[aMeLeu]VKGRK | 37)-Amide |
| 3233 | H[Aib]EGT[AMEF]TSDVSSYLE[Aib | [Aib^{8,22}, AMEF¹²; Lys³⁷]GLP-1(7- |
| | ]QAAKEFIAWLVKGRK | 37)-Amide |
| 3234 | H[Aib]EGTFTSD[BLeu]SSYLE[Aib | [Aib^{8,22}; BLeu¹⁶; Lys³⁷]GLP-1(7- |
| | ]QAAKEFIAWLVKGRK | 37)-Amide |
| 3235 | H[Aib]EGTFTSDVSSYLE[Aib]QAAK | [Aib^{8,22}, Gly³⁶; Lys³⁷]GLP-1(7-37)- |
| | EFIAWLVKGGK | Amide |
| 3236 | H[Aib]EGTFTSDVSSYLE[Aib]QAAK | [Aib^{8,22}, Lys^{33,37}; Asn³⁴; Gly³⁶]GLP- |
| | EFIAWLKNGGK | 1(7-37)-Amide |
| 3237 | H[Aib]EGTFTSDVSSYLE[Aib]QAAK | [ Aib^{8,22}, Lys³³; Asn³⁴; Gly³⁶; Aeea³⁷] |
| | EFIAWLKNGG[Aeea] | GLP-1(7-37)-Aeea-Lys-Amide |
| 3238 | H[Aib]EGTFTSDVSSYLE[Aib]QAAK | [Aib^{8,22}, Gly³⁶]GLP-1(7-37) |
| | EFIAWLVKGGG | |
| 3239 | H[Aib]EGTFTSDVSSYLEGEAAKKFIA | cyclo[E²³-K²⁷][Aib⁸; Gly³⁶]GLP- |
| | WLVKGGG | 1(7-37) |
| 3240 | H[Aib]EGTFTSDVSSYLEEQAAKEKFI | cyclo[E²²-K²⁶] |
| | AWLVKGGK | [Aib⁸; Gly³⁶; Lys³⁷]GLP-1(7- |
| | | 37)-Amide |
| 3241 | H[Aib]EGTFTSDVSSYLE[Aib]EAVR | [Aib^{8,22}]-GLP-1(7-22)-Ex4(17-39) |
| | LFIEWLKNGGPSSGAPPPS | |
| 3242 | HGEGTFTSDVSSYLEEQAAKEFIAWLVK | [Gly^{8,36}, Glu²²]GLP-1(7-37) |
| | GGG | |
| 3243 | H[Aib]EGTFTSDVSSYLEEQAAKEFIA | [Aib⁸; Glu²²; Gly³⁶]GLP-1(7-37)- |
| | WLVKGGG | Amide |
| 3244 | H[Aib]EGTFTSDYSSYLEEQAAKEFIA | [Aib⁸; Tyr¹⁶, Glu²²; Gly³⁶]GLP-1 |
| | WLVKGGG | (7-37) |
| 3245 | H[Aib]EGTFTSDVSKYLEEEAVRLFIE | [Aib⁸; Lys^{18,33}; Glu^{22,23,30}; Val²⁵, |
| | WLKNGGG | Arg²⁶; Leu²⁷; Asn³⁴; Gly³⁶]GLP-1(7-37) |
| 3246 | H[Aib]EGTFTSDVSKYLEEEAAKLFIE | [Aib⁸; Lys^{18,33}, Glu^{22,23,30}; Leu²⁷; |
| | WLKNGGG | Asn³⁴; Gly³⁶]GLP-1(7-37) |
| 3247 | H[Aib]EGTFTSDVSKYLEEEAAKLFIE | [Aib⁸; Lys¹⁸, Glu^{22,23,30}, Leu²⁷; Gly³⁶] |
| | WLVKGGG | GLP-1(7-37) |
| 3248 | H[Aib]IGTFTSDVSSYLE[Aib]QAAK | [Aib^{8,22}; Ile⁹; Gly³⁶]GLP-1_(7-36) |
| | EFIAWLVKGG | |
| 3249 | H[Aib]EGTFTSEVSSYLE[Aib]QAAK | [Aib^{8,22}; Glu¹⁵; Gly³⁶]GLP-1_(7-36) |
| | EFIAWLVKGG | |
| 3286 | {H2}H[Aib]EGTFTSDVSSYLE[Aib] | |
| | QAAKEFIAWLKNGG[Aeea][Aeea]K | |
| | {CONH2} | |
| 3287 | {H2}H[Aib]EGTFTSDVSSYLE[Aib] | |
| | QAAKEFIAWLVKGGG | |
| 3288 | {H2}H[Aib]EGTFTSDVSSYLEGEAAK | |
| | KFIAWLVKGGG | |
| 3289 | {H2}H[Aib]EGTFTSDVSSYLEEQAAK | |
| | EFIAWLVKGGK{CONH2} | |
| 3290 | {H2}H[Aib]EGTFTSDVSSYLE[Aib] | |
| | EAVRLFIEWLKNGGPSSGAPPPS | |
| 3291 | {H2}HGEGTFTSDVSSYLEEQAAKEFIA | |
| | WLVKGGG | |
| 3292 | {H2}H[Aib]EGTFTSDVSSYLEEQAAK | |
| | EFIAWLVKGGG | |
| 3293 | {H2}H[Aib]EGTFTSDYSSYLEEQAAK | |
| | EFIAWLVKGGG | |
| 3294 | {H2}H[Aib]EGTFTSDVSKYLEEEAVR | |
| | LFIEWLKNGGG | |
| 3295 | {H2}H[Aib]EGTFTSDVSKYLEEEAAK | |
| | LFIEWLKNGGG | |
| 3296 | {H2}H[Aib]EGTFTSDVSKYLEEEAAK | |
| | LFIEWLVKGGG | |
| 3297 | {H2}H[Aib]IGTFTSDVSSYLE[Aib] | |
| | QAAKEFIAWLVKGG | |
| 3298 | {H2}H[Aib]EGTFTSEVSSYLE[Aib] | |
| | QAAKEFIAWLVKGG | |
| 3299 | {H2}H[Aib]AGTFTSDVSSYLE[Aib] | |
| | QAAKEFIAWLVKGG | |
| 3300 | {H2}H[Aib]EGTFTSDVSSYLE[Aib] | |
| | QAAKEFAAWLVKGG | |
| 3301 | {H2}H[Aib]EGTFTSDVSSYLE[Aib] | |
| | QAAKEFIAALVKGG | |
| 3302 | {H2}H[Aib]TGTFTSDVSSYLE[Aib] | |
| | QAAKEFIAWLVKGGG | |
| 3303 | {H2}H[Aib]EGTFTSEVSSYLE[Aib] | |
| | QAAKEFIAALVKGGG | |
| 3304 | {H2}H[Aib]EGTFTSDVSSYLE[Aib] | |
| | QAAKEFIAALVKGGG | |
| 3305 | {H2}H[Aib]EGTFTSDVSSYLEEEAVR | |
| | LFIEWLKNGGPSSGAPPPS | |
| 3306 | {H2}H[Aib]EGTFTSDYSSYLE[Aib] | |
| | QAAKEFIAWLVKGGG | |
| 3307 | {H2}H[Aib]EGTFTSDVSSYLE[Aib] | |
| | QAAKEFIAWLVKGGG{CONH2} | |
| 3308 | {Dmia}SQGTFTSDYSKYLDERRAKDFV | |
| | QWLMNT | |
| 3309 | {H2}HGEGTFTSDLSKQMEEEAVRLFIE | |
| | WLKNGGPSSGAPPPS | |

AEEA refers to [2-(2-amino)ethoxy)]acetic acid
EDA refers to ethylenediamine.
MPA refers to maleimidopropionic acid.

[0383] The disclosure also provides pharmaceutical compositions comprising the GLP-1 receptor agonist compounds described herein and a pharmaceutically acceptable carrier. The GLP-1 receptor agonist compounds can be present in the pharmaceutical composition in a therapeutically effective amount and can be present in an amount to provide a minimum blood plasma level of the GLP-1 receptor agonist compound necessary for therapeutic efficacy. Such pharmaceutical compositions are known in the art and described, e.g., in U.S. Pat. Nos. 7,521,423; 7,456,254; WO 2000/037098; WO 2005/021022; WO 2005/102293; WO 2006/068910; WO 2006/125763; WO 2009/068910; US Publication No. 2004/0106547; and the like, the disclosures of which are incorporated herein by reference.

[0384] Pharmaceutical compositions containing the GLP-1 receptor agonist compounds described herein may be provided for peripheral administration, such as parenteral (e.g., subcutaneous, intravenous, intramuscular), a continuous infusion (e.g., intravenous drip, intravenous bolus, intravenous infusion), topical, nasal, or oral administration. Suitable pharmaceutically acceptable carriers and their formulation are described in standard formulation treatises, such as Remington's Pharmaceutical Sciences by Martin; and Wang et al., Journal of Parenteral Science and Technology, Technical Report No. 10, Supp. 42:2S (1988). The GLP-1 receptor agonist compounds described herein can be provided in parenteral compositions for injection or infusion. They can, for example, be suspended in water; an inert oil, such as a vegetable oil (e.g., sesame, peanut, olive oil, and the like); or other pharmaceutically acceptable carrier. In one embodiment, the compounds are suspended in an aqueous carrier, for example, in an isotonic buffer solution at a pH of about 3.0 to 8.0, or about 3.0 to 5.0. The compositions may be sterilized by conventional sterilization techniques or may be sterile filtered. The compositions may contain pharmaceutically acceptable auxiliary substances as required to approximate physiological conditions, such as pH buffering agents.

[0385] Useful buffers include for example, acetic acid buffers. A form of repository or “depot” slow release preparation may be used so that therapeutically effective amounts of the preparation are delivered into the bloodstream over many hours or days following subcutaneous injection, transdermal injection or other delivery method. The desired isotonicity may be accomplished using sodium chloride or other pharmaceutically acceptable agents such as dextrose, boric acid, sodium tartrate, propylene glycol, polyols (such as mannitol and sorbitol), or other inorganic or organic solutes. In one embodiment for intravenous infusion, the formulation may comprise (i) the GLP-1 receptor agonist compound, (2) sterile water, and, optionally (3) sodium chloride, dextrose, or a combination thereof.

[0386] Carriers or excipients can also be used to facilitate administration of the GLP-1 receptor agonist compounds. Examples of carriers and excipients include calcium carbonate, calcium phosphate, various sugars such as lactose, glucose, or sucrose, or types of starch, cellulose derivatives, gelatin, vegetable oils, polyethylene glycols and physiologically compatible solvents.

[0387] The GLP-1 receptor agonist compounds can also be formulated as pharmaceutically acceptable salts (e.g., acid addition salts) and/or complexes thereof. Pharmaceutically acceptable salts are non-toxic salts at the concentration at which they are administered. Pharmaceutically acceptable salts include acid addition salts such as those containing sulfate, hydrochloride, phosphate, sulfamate, acetate, citrate, lactate, tartrate, methanesulfonate, ethanesulfonate, benzenesulfonate, p-toluenesulfonate, cyclohexylsulfamate and quinate. Pharmaceutically acceptable salts can be obtained from acids such as hydrochloric acid, sulfuric acid, phosphoric acid, sulfamic acid, acetic acid, citric acid, lactic acid, tartaric acid, malonic acid, methanesulfonic acid, ethanesulfonic acid, benzenesulfonic acid, p-toluenesulfonic acid, cyclohexylsulfamic acid, and quinic acid. Such salts may be prepared by, for example, reacting the free acid or base forms of the product with one or more equivalents of the appropriate base or acid in a solvent or medium in which the salt is insoluble, or in a solvent such as water which is then removed in vacuo or by freeze-drying or by exchanging the ions of an existing salt for another ion on a suitable ion exchange resin.

[0388] Exemplary pharmaceutical formulations of GLP-1 receptor agonist compounds are described in U.S. Pat. Nos. 7,521,423, 7,456,254; US Publication No 2004/0106547, WO 2006/068910, WO 2006/125763, and the like, the disclosures of which are incorporated by reference herein.

[0389] The therapeutically effective amount of the GLP-1 receptor agonist compounds described herein for use in the methods described herein will typically be from about 0.01 μg to about 5 mg; about 0.1 μg to about 2.5 mg; about 1 μg to about 1 mg; about 1 μg to about 50 μg; or about 1 μg to about 25 μg. Alternatively, the therapeutically effective amount of the GLP-1 receptor agonist compounds may be from about 0.001 μg to about 100 μg based on the weight of a 70 kg patient; or from about 0.01 μg to about 50 μg based on the weight of a 70 kg patient. These therapeutically effective doses may be administered once/day, twice/day, thrice/day, once/week, biweekly, or once/month, depending on the formulation. The exact dose to be administered is determined, for example, by the formulation, such as an immediate release formulation or an extended release formulation. For transdermal, nasal or oral dosage forms, the dosage may be increased from about 5-fold to about 10-fold.

[0390] In certain embodiments the GLP-1 receptor agonist will be administered concurrently with the GIPR antigen binding protein. In one embodiment the GLP-1 receptor agonist will be administered after the GIPR antigen binding protein. In one embodiment the GLP-1 receptor agonist will be administered before the GIPR antigen binding protein. In certain embodiments the subject or patient will already be being treated with a GLP-1 receptor agonist before being subjected to further treatment with a GIPR antigen binding protein.

[0391] The GIPR antigen binding proteins that are provided herein are useful for detecting GIPR in biological samples. For instance, the GIPR antigen binding proteins can be used in diagnostic assays, e.g., binding assays to detect and/or quantify GIPR expressed in serum.

[0392] The antigen binding proteins of the described can be used for diagnostic purposes to detect, diagnose, or monitor diseases and/or conditions associated with GIPR. The disclosed antigen binding proteins provide a means for the detection of the presence of GIPR in a sample using classical immunohistological methods known to those of skill in the art (e.g., Tijssen, 1993, Practice and Theory of Enzyme Immunoassays, Vol 15 (Eds R. H. Burdon and P. H. van Knippenberg, Elsevier, Amsterdam); Zola, 1987, Monoclonal Antibodies: A Manual of Techniques, pp. 147-158 (CRC Press, Inc.); Jalkanen et al., 1985, J Cell. Biol. 101:976-985; Jalkanen et al., 1987, J. Cell Biol. 105:3087-3096). The detection of GIPR can be performed in vivo or in vitro.

[0393] Diagnostic applications provided herein include use of the antigen binding proteins to detect expression of GIPR. Examples of methods useful in the detection of the presence of GIPR include immunoassays, such as the enzyme linked immunosorbent assay (ELISA) and the radioimmunoassay (RIA).

[0394] For diagnostic applications, the antigen binding protein typically will be labeled with a detectable labeling group. Suitable labeling groups include, but are not limited to, the following: radioisotopes or radionuclides (e.g., ³H, ¹⁴C, ¹⁵N, ³⁵S ⁹⁰Y, ⁹⁹Tc, ¹¹¹In, ¹²⁵I, ¹³¹I) fluorescent groups (e.g., FITC, rhodamine, lanthanide phosphors), enzymatic groups (e.g., horseradish peroxidase, β-galactosidase, luciferase, alkaline phosphatase), chemiluminescent groups, biotinyl groups, or predetermined polypeptide epitopes recognized by a secondary reporter (e.g., leucine zipper pair sequences, binding sites for secondary antibodies, metal binding domains, epitope tags). In some embodiments, the labeling group is coupled to the antigen binding protein via spacer arms of various lengths to reduce potential steric hindrance. Various methods for labeling proteins are known in the art and may be used.

[0395] In some embodiments, the GIPR antigen binding protein is isolated and measured using techniques known in the art. See, for example, Harlow and Lane, 1988, Antibodies: A Laboratory Manual, New York: Cold Spring Harbor (ed. 1991 and periodic supplements); John E. Coligan, ed., 1993, Current Protocols In Immunology New York: John Wiley & Sons.

[0396] Another aspect of the disclosed provides for detecting the presence of a test molecule that competes for binding to GIPR with the antigen binding proteins provided. An example of one such assay would involve detecting the amount of free antigen binding protein in a solution containing an amount of GIPR in the presence or absence of the test molecule. An increase in the amount of free antigen binding protein (i.e., the antigen binding protein not bound to GIPR) would indicate that the test molecule is capable of competing for GIPR binding with the antigen binding protein. In one embodiment, the antigen binding protein is labeled with a labeling group. Alternatively, the test molecule is labeled and the amount of free test molecule is monitored in the presence and absence of an antigen binding protein.

[0397] GIPR binding proteins can be used to treat, diagnose or ameliorate, a metabolic condition or disorder. In one embodiment, the metabolic disorder to be treated is diabetes, e.g., type 2 diabetes. In another embodiment, the metabolic condition or disorder is obesity. In other embodiments the metabolic condition or disorder is dyslipidemia, elevated glucose levels, elevated insulin levels or diabetic nephropathy. For example, a metabolic condition or disorder that can be treated or ameliorated using a GIPR binding peptide includes a state in which a human subject has a fasting blood glucose level of 125 mg/dL or greater, for example, 130, 135, 140, 145, 150, 155, 160, 165, 170, 175, 180, 185, 190, 195, 200 or greater than 200 mg/dL. Blood glucose levels can be determined in the fed or fasted state, or at random. The metabolic condition or disorder can also comprise a condition in which a subject is at increased risk of developing a metabolic condition. For a human subject, such conditions include a fasting blood glucose level of 100 mg/dL. Conditions that can be treated using a pharmaceutical composition comprising a GIPR binding protein can also be found in the American Diabetes Association Standards of Medical Care in Diabetes Care-2011, American Diabetes Association, Diabetes Care Vol. 34, No. Supplement 1, S11-S61, 2010, incorporated herein by reference.

[0398] In application, a metabolic disorder or condition, such as Type 2 diabetes, elevated glucose levels, elevated insulin levels, dyslipidemia, obesity or diabetic nephropathy, can be treated by administering a therapeutically effective dose of a GIPR binding protein to a patient in need thereof. The administration can be performed as described herein, such as by IV injection, intraperitoneal (IP) injection, subcutaneous injection, intramuscular injection, or orally in the form of a tablet or liquid formation. In some situations, a therapeutically effective or preferred dose of a GIPR binding protein can be determined by a clinician. A therapeutically effective dose of GIPR binding protein will depend, inter alia, upon the administration schedule, the unit dose of agent administered, whether the GIPR binding protein is administered in combination with other therapeutic agents, the immune status and the health of the recipient. The term “therapeutically effective dose,” as used herein, means an amount of GIPR binding protein that elicits a biological or medicinal response in a tissue system, animal, or human being sought by a researcher, medical doctor, or other clinician, which includes alleviation or amelioration of the symptoms of the disease or disorder being treated, i.e., an amount of a GIPR binding protein that supports an observable level of one or more desired biological or medicinal response, for example lowering blood glucose, insulin, triglyceride, or cholesterol levels; reducing body weight; or improving glucose tolerance, energy expenditure, or insulin sensitivity.

[0399] It is noted that a therapeutically effective dose of a GIPR binding protein can also vary with the desired result. Thus, for example, in situations in which a lower level of blood glucose is indicated a dose of GIPR binding protein will be correspondingly higher than a dose in which a comparatively lower level of blood glucose is desired. Conversely, in situations in which a higher level of blood glucose is indicated a dose of GIPR binding protein will be correspondingly lower than a dose in which a comparatively higher level of blood glucose is desired.

[0400] In various embodiments, a subject is a human having a blood glucose level of 100 mg/dL or greater can be treated with a GIPR binding protein.

[0401] In one embodiment, a method of the instant disclosure comprises first measuring a baseline level of one or more metabolically-relevant compounds such as glucose, insulin, cholesterol, lipid in a subject. A pharmaceutical composition comprising a GIPR binding protein is then administered to the subject. After a desired period of time, the level of the one or more metabolically-relevant compounds (e.g., blood glucose, insulin, cholesterol, lipid) in the subject is again measured. The two levels can then be compared in order to determine the relative change in the metabolically-relevant compound in the subject. Depending on the outcome of that comparison another dose of the pharmaceutical composition comprising a GIPR binding protein can be administered to achieve a desired level of one or more metabolically-relevant compound.

[0402] It is noted that a pharmaceutical composition comprising a GIPR binding protein can be co-administered with another compound. The identity and properties of compound co-administered with the GIPR binding protein will depend on the nature of the condition to be treated or ameliorated. A non-limiting list of examples of compounds that can be administered in combination with a pharmaceutical composition comprising a GIPR binding protein include rosiglitizone, pioglitizone, repaglinide, nateglitinide, metformin, exenatide, stiagliptin, pramlintide, glipizide, glimeprirideacarbose, and miglitol.

[0403] Also provided are kits for practicing the disclosed methods. Such kits can comprise a pharmaceutical composition such as those described herein, including nucleic acids encoding the peptides or proteins provided herein, vectors and cells comprising such nucleic acids, and pharmaceutical compositions comprising such nucleic acid-containing compounds, which can be provided in a sterile container. Optionally, instructions on how to employ the provided pharmaceutical composition in the treatment of a metabolic disorder can also be included or be made available to a patient or a medical service provider.

[0404] In one aspect, a kit comprises (a) a pharmaceutical composition comprising a therapeutically effective amount of a GIPR binding protein; and (b) one or more containers for the pharmaceutical composition. Such a kit can also comprise instructions for the use thereof; the instructions can be tailored to the precise metabolic disorder being treated. The instructions can describe the use and nature of the materials provided in the kit. In certain embodiments, kits include instructions for a patient to carry out administration to treat a metabolic disorder, such as elevated glucose levels, elevated insulin levels, obesity, type 2 diabetes, dyslipidemia or diabetic nephropathy.

[0405] Instructions can be printed on a substrate, such as paper or plastic, etc., and can be present in the kits as a package insert, in the labeling of the container of the kit or components thereof (e.g., associated with the packaging), etc. In other embodiments, the instructions are present as an electronic storage data file present on a suitable computer readable storage medium, e.g. CD-ROM, diskette, etc. In yet other embodiments, the actual instructions are not present in the kit, but means for obtaining the instructions from a remote source, such as over the internet, are provided. An example of this embodiment is a kit that includes a web address where the instructions can be viewed and/or from which the instructions can be downloaded.

[0406] Often it will be desirable that some or all components of a kit are packaged in suitable packaging to maintain sterility. The components of a kit can be packaged in a kit containment element to make a single, easily handled unit, where the kit containment element, e.g., box or analogous structure, may or may not be an airtight container, e.g., to further preserve the sterility of some or all of the components of the kit.

### Example 1

### Generation of Bis-Cysteamine-Capped Anti-GIPR Cys mAb (2 g Scale)

[0407] The reaction scheme for the generation of anti-GIPR/GLP-1 peptide conjugates is shown in FIG. 1. Anti-GIPR monoclonal antibodies with specific cysteine mutation (anti-GIPR cys mAb, 2 g) was incubated with 800 mL solution of 2.5 mM cystamine and 2.5 mM cysteamine in 40 mM HEPES buffer, pH 7.5-8.5 for 15-20 h. The reaction mixture was filtered using 0.22 μm filter, and diluted in 1200 mL of 100 mM sodium acetate buffer pH 5. Cation exchange chromatography was used to purify the bis-cysteamine-capped anti-GIPR cys mAb from the reaction mixture. First, 2 L of reaction mixture diluted in 100 mM sodium acetate buffer pH 5 was loaded onto 240 mL SP HP column at 20 mL/min. The column was washed with 2 column volumes of 100 mM sodium acetate pH 5, followed by a 0-20% gradient of 100 mM sodium acetate with 1.2 M NaCl pH 5. The main peak containing bis-cysteamine-capped anti-GIPR cys mAb was collected and buffer exchanged to 10 mM sodium acetate with 9% sucrose pH 5.2 using tangential flow filtration.

### Example 2

### Generation of Anti-GIPR/GLP-1 Peptide Conjugates

[0408] Bis-cysteamine-capped anti-GIPR cys mAb (6 mg/mL in 10 mM sodium acetate with 9% sucrose) was partially reduced using 3-4 equivalents of tris(2-carboxyethyl)phosphine (TCEP) at RT for 60-90 min. TCEP was removed, and partially reduced cys mAb was buffer exchanged to 50 mM sodium phosphate buffer containing 2 mM ethylenediaminetetraacetic acid (EDTA) pH 7.5. To the partially reduced cys mAb was added 6-10 equivalents of dehydroascorbic acid (DHAA), and oxidation was carried out at RT until only trace amount of partially reduced mAb species were observed (30-120 min). Without removing dhAA, 3-8 equivalents of bromoacetyl-GLP-1 peptides was added to the reaction mixture and incubated at RT for 15-20 h. All the reagents were removed, and the anti-GIPR/GLP-1 peptide conjugate product was buffer exchanged to final formulation using spin concentration or tangential flow filtration.

TABLE 9
Anti-GIPR antagonist/GLP-1 receptor agonist bispecific conjugates constructs.

| | | | | hGLP-1 | hGIPR |
|---|---|---|---|---|---|
| Conjugate# | Description | Peptide information | Site/linker | IC₅₀(nM) | IC₅₀(nM) |
| 3159936#1 | 5G12-D88C-3156820 | [Aib8, Lys26(SGGAcBr)]GLP-1 (7-37) | Lys26/SGG | 0.167 | 81.9 |
| 1140-1 | 5G12-D88C-3156820 | [Aib8, Lys26(SGGAcBr)]GLP-1 (7-37) | Lys26/SGG | 0.059 | 101.6 |
| 1109-1 | 5G12-E384C- | [Aib8, Lys26(SGGAcBr)]GLP-1 (7-37) | Lys26/SGG | 0.622 | 44.9 |
| | 3156820 DAR1 | | | | |
| 1110-1 | 5G12-E384C- | [Aib8, Lys26(SGGAcBr)]GLP-1 (7-37) | Lys26/SGG | 0.159 | 47.0 |
| | 3156820 | | | | |
| 1118-1 | 5G12 SEFL2 D88C- | [Aib8, Lys26(SGGAcBr)]GLP-1 (7-37) | Lys26/SGG | 0.143 | 61.2 |
| | 3156820 DAR1 | | | | |
| 1135-1 | 5G12 T487C- | [Aib8, Lys26(SGGAcBr)]GLP-1 (7-37) | Lys26/SGG | 0.065 | 50.6 |
| | 3156820 | | | | |
| 1143-1 | 5G12-E384C- | [Aib8, 22; Gly36; Lys37(PEG11AcBr)]GLP-1(7-37)-Amide | Lys37/PEG11 | 0.047 | 37.0 |
| | 3161655 | | | | |
| 1144-1 | 5G12-E384C- | [Aib8,22; Lys36(SGGACBr)]GLP-1(7-36)-Amide | Lys36/SGG | 0.036 | 37.9 |
| | 3161021 | | | | |
| 1159-1 | 5G12-D88C-3166119 | [Aib8,22; Gly36]GLP-1(7-37) | C- | 0.044 | 152.1 |
| | | [GGGGSGGGGSGGGGSK(BrAc)] | term/(GGGGS)3 | | |
| 1160-1 | 5G12-E384C- | [Aib8,22; Gly36]GLP-1(7-37) | C- | 0.171 | 43.5 |
| | 3166119 | [GGGGSGGGGSGGGGSK(BrAc)] | term/(GGGGS)3 | | |
| 1161-1 | 5G12-T4874C- | [Aib8,22; Gly36]GLP-1(7-37) | C- | 0.032 | 41.3 |
| | 3166119 | [GGGGSGGGGSGGGGSK(BrAc)] | term/(GGGGS)3 | | |
| 1163-1 | 5G12-D88C-3157736 | [Aib8; Glu22-Lys26; Gly36]GLP-1(7-37) | C- | 0.01 | 275.5 |
| | | [GGGGSGGGGSGGGGSK(BrAc)] | term/(GGGGS)3 | | |
| 1164-1 | 5G12-E384C- | [Aib8; Glu22-Lys26; Gly36]GLP-1(7-37) | C- | 0.053 | 26.8 |
| | 3157736 | [GGGGSGGGGSGGGGSK(BrAc)] | term/(GGGGS)3 | | |
| 1165-1 | 5G12-T487C- | [Aib8; Glu22-Lys26; Gly36]GLP-1(7-37) | C- | 0.014 | 34 |
| | 3157736 | [GGGGSGGGGSGGGGSK(BrAc)] | term/(GGGGS)3 | | |
| 1172-1 | 5G12-E384C- | cyclo[E22-K26][Aib8; Lys(NPeg11-BrAc)37]GLP-1(7-37)- | Lys37/PEG11 | 0.044 | 50 |
| | 3169019 | Amide | | | |
| 1198-1 | 5G12-E384C- | [Aib8,22; Gly36; Lys(NPeg27-BrAc)37]GLP-1(7-37)-Amide | Lys37/PEG27 | 0.0329 | 98.5 |
| | 3169018 | | | | |
| 1199-1 | 5G12-T487C- | [Aib8,22; Gly36; Lys(NPeg27-BrAc)37\|GLP-1(7-37)-Amide | Lys37/PEG27 | 0.006 | 84 |
| | 3169018 | | | | |
| 1200-1 | 5G12-E384C- | [Aib8; Glu23-Lys27; Gly36]GLP-1(7-37) | C- | 0.045 | 40.4 |
| | 3172563 | [GGGGSGGGGSGGGGSK(BrAc)] | term/(GGGGS)3 | | |
| 1201-1 | 5G12-T487C- | [Aib8; Glu23-Lys27; Gly36]GLP-1(7-37) | C- | 0.011 | 35 |
| | 3172563-DAR2 | [GGGGSGGGGSGGGGSK(BrAc)] | term/(GGGGS)3 | | |
| 1202-1 | 5G12-T487C- | [Aib8; Glu23-Lys27; Gly36]GLP-1(7-37) | C- | 0.01 | 30 |
| | 3172563-DAR1 | [GGGGSGGGGSGGGGSK(BrAc)] | term/(GGGGS)3 | | |
| 1203-1 | 5G12-T487C- | [Aib8; Glu22-Lys26; Gly36]GLP-1(7-37) | C- | 0.0072 | 45.4 |
| | 3167736-DAR1 | [GGGGSGGGGSGGGGSK(BrAc)] | term/(GGGGS)3 | | |
| 1227-1 | 5G12-E384C- | [Aib8,22]-GLP-1(7-22)-Ex4(17-39) | C- | 0.0236 | 96.5 |
| | 3173043 | [GGGGSGGGGSGGGGSK(BrAc)] | term/(GGGGS)3 | | |
| 1228-1 | 5G12-E384C- | [Aib8,22; Gly36]GLP-1(7-37)-1K2015-Lys(BrAc) | C-term/1Kmod | 0.0306 | 103.8 |
| | 3173044 | | | | |
| 1229-1 | 5G12-E384C- | Exendin-4(1-39)[GGGGSGGGGSGGGGSK(BrAc)] | C- | 0.013 | 84.9 |
| | 3340181 | | term/(GGGGS)3 | | |
| 1230-1 | 5G12-E384C- | [Gly8,36; Glu22]GLP-1(7-37) | C- | 0.0376 | 92.2 |
| | 3340577 | [GGGGSGGGGSGGGGSK(BrAc)] | term/(GGGGS)3 | | |
| 1231-1 | 5G12-E384C- | [Aib8; Glu22; Gly36]GLP-1(7-37) | C- | 0.0297 | 101.9 |
| | 3340578 | [GGGGSGGGGSGGGGSK(BrAc)] | term/(GGGGS)3 | | |
| 1233-1 | aGIPR 5G12 E384C | [Aib8,22; Glu15; Gly36; Lys]GLP-1(7-37)-(G4S)3K(BrAc)- | C- | 0.118 | 121 |
| | Ab-3342048 | amide | term/(GGGGS)3 | | |
| 1234-1 | aGIPR 5G12 E384C | [Aib8,22; Gly36]GLP-1(7-37)-(G4S)2K(BrAc)-amide | Lys37(C- | 0.0446 | 108 |
| | Ab-3341281 | | term)/(GGGGS)2 | | |
| 1235-1 | aGIPR 5G12 E384C | [Aib8,22; Gly36]GLP-1(7-37)-AS(AP)5GSK(BrAc)-amide | C- | 0.0311 | 122 |
| | Ab-3341282 | | term/AS(AP)5GS | | |
| 1237-1 | aGIPR 5G12 SEFL2 | [Aib8,22; Gly36]GLP-1_(7-37)-Pro-Ser-Ser-Gly-Ala-Pro-Pro- | C- | 0.0226 | 83.5 |
| | E384C-3341284 | Pro-Ser-(G4S)2K(AcBr) | term/(GGGGS)2 | | |
| 1238-1 | aGIPR 5G12 SEFL2 | [Aib8; Tyr16; Glu22; Gly36]GLP-1_(7-37)-(G4S)3-K(AcBr) | C- | 0.0046 | 82.8 |
| | E384C-3341285 | | term/(GGGGS)3 | | |
| 1239-1 | aGIPR 6H1 SEFL2 | [Aib8,22; Gly36]GLP-1(7-37)-G4S3-Lys(BrAc) | C- | 0.126 | 34.3 |
| | E384C-3166119 | | term/(GGGGS)3 | | |
| 1240-1 | aGIPR 5G12 SEFL2 | [Aib8,22; Ile9; Gly36]GLP-1_(7-36)-(G4S)3-K(AcBr) | C- | 0.0552 | 111 |
| | E384C-3342047 | | term/(GGGGS)3 | | |
| 1241-1 | aGIPR 5G12 SEFL2 | [Aib8,22; Ala9; Gly36]GLP-1_(7-36)-(G4S)3-K(AcBr) | C- | 0.0549 | 92.3 |
| | E384C-3342049 | | term/(GGGGS)3 | | |
| 1242-1 | aGIPR 5G12 SEFL2 | [Aib8,22; Ala29; Gly36]GLP-1_(7-36)-(G4S)3-K(AcBr) | C- | 0.173 | 92.4 |
| | E384C-3342050 | | term/(GGGGS)3 | | |
| 1243-1 | aGIPR 5G12 SEFL2 | [Aib8,22; Ala31; Gly36]GLP-1_(7-36)-(G4S)3-K(AcBr) | C- | 1.147 | 75.9 |
| | E384C-3342051 | | term/(GGGGS)3 | | |
| 1248-1 | aGIPR 2G10 SEFL2 | [Aib8,22; Gly36]GLP-1(7-37)[GGGGSGGGGSGGGGS(BrAc)] | C- | 0.015 | 68.9 |
| | E384C-3166119 | | term/(GGGGS)3 | | |
| 1250-1 | aGIPR 5G12 SEFL2 | [Aib8,22; Thr9; Gly36]GLP-1_(7-37)-(G4S)3-K(AcBr) | C- | 0.069 | 85 |
| | E384C-3343106 | | term/(GGGGS)3 | | |
| 1251-1 | aGIPR 5G12 SEFL2 | [Aib8,22; Glu15; Ala31; Gly36]GLP-1_(7-37)-(G4S)3-K(AcBr) | C- | 0.32 | 85 |
| | E384C-3343109 | | term/(GGGGS)3 | | |
| 1252-1 | aGIPR 5G12 SEFL2 | [Aib8,22; Ala31; Gly36]GLP-1_(7-37)-(G4S)3-K(AcBr) | C- | 0.2 | 78.8 |
| | E384C-3343110 | | term/(GGGGS)3 | | |
| 1253-1 | aGIPR 5G12 SEFL2 | [Aib8,22; LysG4S3G(AcBr)26; Gly36]GLP-1_(7-37) | Lys26/(GGGGS)3 | 0.0013 | 77.4 |
| | E384C-3343906 | | | | |
| 1253-2 | aGIPR 5G12 SEFL2 | [Aib8,22; LysG4S3G(AcBr)26; Gly36]GLP-1_(7-37) | Lys26/(GGGGS)3 | 0.0084 | 51.4 |
| | E384C-3343906 | | | | |
| 1254-1 | aGIPR 5G12 SEFL2 | [Aib8,22; Tyr16; Gly36]GLP-1(7-37)-(G4S)3-K(AcBr) | C- | 0.0058 | 73.8 |
| | E384C-3343905 | | term/(GGGGS)3 | | |
| 1255-1 | aGIPR 2G10 SEFL2 | [Aib8,22; Gly36]GLP-1(7-37)-G4S2K(BrAc) | C- | 0.026 | 56.4 |
| | E384C-3341281 | | term/(GGGGS)2 | | |
| 1256-1 | aGIPR 2G10 SEFL2 | [Aib8,22; Thr9; Gly36]GLP-1(7-37)-G4S2K(BrAc) | C- | 0.104 | 66 |
| | E384C-3343106 | | term/(GGGGS)3 | | |
| 1257-1 | aGIPR 2G10 SEFL2 | [Aib8, Glu22; Gly36]GLP-1(7-37)-G4S3-K(BrAc) | C- | 0.011 | 66 |
| | E384C-3340578 | | term/(GGGGS)3 | | |
| 1258-1 | 2G10 SEFL2 E384C- | [Aib8,22; Glu15; Ala31; Gly36]GLP-1_(7-37)-(G4S)3-K(AcBr) | C- | 3.58 | 53.9 |
| | 3343109 | | term/(GGGGS)3 | | |
| 1261-1 | 2G10 SEFL2 E384C- | [Aib8,22; Ala31; Gly36]GLP-1 (7-37)-(G4S)3-K(AcBr) | C- | 0.096 | 41.9 |
| | 3343110 | | term/(GGGGS)3 | | |
| 1262-1 | aGIPR 2G10 SEFL2 | [Aib8,22; Tyr16; Gly36]GLP-1 (7-37)-(G4S)3-K(AcBr) | C- | 0.0347 | 52.9 |
| | E384C-3343905 | | term/(GGGGS)3 | | |
| 1263-1 | aGIPR 2G10 SEFL2 | [Aib8,22; LysG4S3G(AcBr)26; Gly36]GLP-1_(7-37) | Lys26/(GGGGS)3 | 0.0143 | 48.7 |
| | E384C-3343906 | | | | |
| 1264-1 | 2G10 SEFL2 E384C- | [Aib8,22; Glu15; Gly36]GLP-1 (7-37)-(G4S)3-K(AcBr) | C- | 0.0459 | 48.6 |
| | 3344713 | | term/(GGGGS)3 | | |
| 1264-2 | 2G10 SEFL2 E384C- | [Aib8,22; Glu15; Gly36]GLP-1 (7-37)-(G4S)3-K(AcBr) | C- | 0.112 | 40.3 |
| | 3344713 | | term/(GGGGS)3 | | |
| 1265-1 | 2G10 SEFL2 E384C- | [Aib8,22; Tyr16; Gly36]GLP-1 (7-37)-(GGGGSGG)-K(AcBr) | C- | 0.0439 | 50.4 |
| | 3344748 | | term/GGGGSGG | | |
| 1265-2 | 2G10 SEFL2 E384C- | [Aib8,22; Tyr16; Gly36]GLP-1_(7-37)-(GGGGSGG)-K(AcBr) | C- | 0.177 | 50.4 |
| | 3344748 | | term/GGGGSGG | | |
| 1267-1 | aGIPR 2G10 SEFL2 | cyclo[E22-K26][Aib8; (NPeg11-BrAc)37]GLP-1(7-37)-Amide | Lys37/PEG11 | 0.004 | 49.3 |
| | E384C-3169019 | | | | |
| 1269-1 | aGIPR 5G12 SEFL2- | [Aib8,22; Glu15; Gly36]GLP-1 (7-37)-(G4S)3-K(AcBr) | C- | 0.0169 | 57.4 |
| | E384C-3344713 | | term/(GGGGS)3 | | |
| 1270-1 | aGIPR 5G12 SEFL2- | [Aib8,22; Tyr16; Gly36]GLP-1 (7-37)-(GGGGSGG)-K(AcBr) | C- | 0.0298 | 50.9 |
| | E384C-3344748 | | term/(GGGGS)3 | | |
| 1272-1 | aGIPR 2G10 SEFL2- | [Aib8,22; Gly36]GLP-1_(7-37)-PEG11-AcBr | Lys37/PEG11 | 0.055 | 53 |
| | E384C-3161655 | | | | |
| 1273-1 | aGIPR 2G10 SEFL2- | [Aib8; Tyr16; Glu22; Gly36]GLP-1_(7-37)-(GGGGSGG)- | C- | 0.061 | 42.3 |
| | E384C-3341285 | K(AcBr) | term/(GGGGS)3 | | |
| 1274-1 | aGIPR 2G10 SEFL2- | [Aib8,22]-GLP-1(7-22)-Ex4(17-39)-(G4S)K-BrAc | C-term/(GGGGS) | 0.199 | 36.4 |
| | E384C-3345837 | | | | |
| 1281-1 | aGIPR 2G10 SEFL2- | [Aib8,22]-GLP-1(7-22)-Ex4(17-39)-(G4S)2K-BrAc | C- | 0.177 | 47.9 |
| | E384C-3345836 | | term/(GGGGS)2 | | |
| 1282-1 | aGIPR 2G10 SEFL2- | [Aib8,22]-GLP-1(7-22)-Ex4(17-39)-(G4S)3K-BrAc | C- | 0.094 | 43.9 |
| | E384C-3173043 | | term/(GGGGS)3 | | |
| 1283-1 | aGIPR 5G12 SEFL2- | [Aib8,22]-GLP-1(7-22)-Ex4(17-39)-(G4S)2K-BrAc | C- | 0.139 | 67.8 |
| | E384C-3345836 | | term/(GGGGS)2 | | |
| 1284-1 | aGIPR 5G12 SEFL2- | [Aib8,22]-GLP-1(7-22)-Ex4(17-39)-(G4S)K-BrAc | C-term/(GGGGS) | 0.154 | 63.8 |
| | E384C-3345837 | | | | |

### Example 3

### Methods for In Vitro and In Vivo Assay

### GLP-1 Receptor Agonist Activity

[0409] CHOK1 cells stably expressing the human GLP-1R alone or both GLP-1R and GIPR (M1) were used to measure peptide/conjugate-induced cAMP production in a homogeneous time-resolved fluorescence (HTRF) assay (CISBIO, cat #62AM4PEJ). Serial diluted peptides/conjugates (3×10⁻⁷ M-3×10⁻¹⁴ M) were incubated with 40,000 cells in assay buffer (0.1% BSA, 500 uM IBMX in F12 media) for 15 min at 37° C. Cells were then lysed with lysis buffer containing cAMP-d2 and cAMP cryptate (CISBIO) and incubated for 1 hour at room temperature before measured in Evision plate reader (PerkinElmer). The cAMP levels are expressed as a fluorescence ratio of 665/620 nm and shown in FIGS. 2A-2E and FIG. 3.

### Example 4

### GIPR Antagonist Activity

[0410] HEK 293T cells stably expressing the human GIPR were used to measure peptide/conjugate-induced cAMP generation in HTRF assay (Cisbio, cat #62AM4PEJ). Serial diluted conjugates or GIPR antibody (3×10⁻⁶ M-1×10⁻¹¹ M) were incubated with 30,000 cells in assay buffer (0.1% BSA, 500 uM IBMX in F12 media) for 30 min at 37° C. before being treated with GIP at final concentration of 0.05 nM. Cells were incubated for 30 min at 37° C. and then lysed in lysis buffer containing cAMP-d2 and cAMP cryptate (CISBIO) for 1 hour at room temperature. The fluorescence was measured in Evision plate reader (PerkinElmer) and the cAMP levels are expressed as a ratio of 665/620 nm and shown in FIGS. 2A-2E and Figure.

### Example 5

### Materials and Methods for Bispecific-Mouse In Vivo

[0411] Diabetic mice were selected primarily to screen for GLP-1 activity of the bispecific molecules. Molecules were selected based on their potential to reduce plasma glucose levels at different time points post injection. In addition, body weight loss or inhibition of body weight gain was also measured indicative of GLP-1 activity, GIPR inhibition, or a combination of both, either from co-administration of each or from the bispecific molecule as shown in FIGS. 4A-4I. Male db/db mice (#642) were obtained from Jackson Laboratories (Bar Harbor, ME) and delivered at 8-9 weeks of age. Upon arrival, mice were group-housed at four per cage and maintained in controlled environmental conditions with 12 hour light (6:30 AM-6:30 PM) and dark cycles (6:30 PM-6:30 AM). Mice were fed a standard rodent chow diet (2020x Harlan Teklad) with free-access to drinking water.

[0412] In other studies, glucose tolerance test was used to rank the potency of GLP-1 analogs (FIGS. 5A-5C). C57Bl6 mice were acclimated to environment conditions for one to two weeks. Prior to dosing, mice were handled and body weight measurements were taken. One day prior to dosing, conscious mice were bled from the retro-orbital sinus for plasma glucose measurement using a handheld glucometer designed for rodent plasma. On the day of dosing, baseline plasma glucose and body weight measurements were taken. The cage mean for plasma glucose and body weight were used to stratify cages into treatment groups. Mice were maintained in their home cages. Following administration of test article, plasma glucose was measured at various time points at (1, 3, and 6 hr) or (4 hr) and plasma glucose and body weight measurements were taken every 24 hrs thereafter. Plasma glucose levels were measured until levels returned to near baseline levels and body weight measurements were taken until the rate of body weight gain was similar to Vehicle-treated control group.

[0413] Diet-induced obese mice (DIO) were also used as a model to measure weight loss effects from treatment with different molecules as shown in FIG. 6.

[0414] Male c57bl6 mice were obtained from Harlan Laboratories and delivered at 26 days of age. Mice were group-housed with littermates consisting between two to four mice per cage. Following one week of acclimation, mice were started on a feeding regimen of high-fat diet (HFD: D12492, Research Diets, New Brunswick, NJ) or continued on standard rodent diet (2020x, Harlan Laboratories). After 12 weeks of feeding, single-housed mice were acclimated to routine handling, food intake measurement, and daily saline injections (IP). Blood was collected from the retro orbital sinus of conscious DIO mice. A small volume of blood was immediately placed on a handheld glucometer designed for rodent plasma and the remaining blood was placed in EDTA filled collection tubes with a protease-inhibitor cocktail (Roche Diagnostics, Indianapolis, IN). Following centrifugation, plasma was stored at −80 C. Mice were stratified into treatment groups based on body weight, and plasma glucose measurements. Mice were treated with Vehicle (Q3D), GIPR Ab (2.5 or 10 mg/kg, Q3D), GLP-1 Peptide (0.06 mg/kg, QD), Dulaglutide (1 mg/kg, Q3D), or bispecific conjugate (2.5 or 10 mg/kg, Q3D). 2 additional groups of mice received a combination treatment of GLP-1 and GIPR Ab with the above dosage and dose frequency (GIPR 2.5 mg/kg+GLP-1 Peptide and GIPR 2.5 mg/kg+Dulaglutide). Aside from the GLP-1 Peptide dosed groups, all other mice were injected with saline when not dosed with their respective test article. Body weight was measured daily and cumulative food intake over three days was averaged for a daily food intake value. Food intake was measured between study days 0-3 and days 6-9. A blood collection was taken on study Day 9, 1 hour post injection and a terminal blood collection was taken on study Day 12, 1 or 3 days post the previous test article injection.

[0415] Plasma insulin was measured with a mouse ELISA kit following manufacturer's instructions (ALPCO, Salem, NH). Plasma glucose, cholesterol, triglyceride, non-esterified fatty acids, AST, and ALT were measured using an Olympus AU400e Chemistry Analyzer (Olympus America, Center Valley, PA).

### Example 6

### Materials and Methods for Bispecific-Cyno In Vivo

[0416] Naive male spontaneously obese cynomolgus monkeys (age 9-14 years) were acclimated/trained to experimental procedures prior to study initiation and were sorted into 7 treatment groups with n=10 monkeys each with equal distribution among groups for all sorting parameters (body weight and blood chemistries). Monkeys were then injected once weekly for 6 weeks with vehicle or GLP-1R-GIPR conjugates (1264, 1273, 1248 or 1257). After the 6 week treatment period, monkeys went through a 4 week washout phase. During training/treatment/washout phases of study, total energy intake was monitored daily; body weight, blood chemistries and drug exposure were monitored weekly or every other week as shown in FIGS. 7-21.

### Example 7

### Materials and Methods for GIP and GLP-1 Radioligand Competition Binding Assay

[0417] Membranes were prepared from mammalian cell lines overexpressing hu GIPR and hu GLP-1R and were typically stored at −80° C. in Assay Buffer: 50 mM HEPES (7.4), 5 mM MgCl₂, 1 mM CaCl₂), 0.2% BSA and Protease Inhibitor Tablets “EDTA Free”. Unlabeled GIP and GLP-1 peptides were obtained from Phoenix Pharmaceuticals and Radiolabeled ¹²⁵I-GIP and ¹²⁵I-GLP-1 were ordered from Perkin Elmer. Primary reactions were conducted for 2 h at room temperature with shaking in 96 well cell culture round bottom plates (Costar). Cell membrane concentration was fixed at 0.6 mg/mL and radioligands were used at a concentration of 0.1 nM. Test articles were titrated at six concentrations in duplicate. The primary plate was harvested after two hours with ice cold 50 mM TRIS (pH 7.4) using a Filtermate Harvester (Perkin Elmer) and cell membranes were captured on PEI-treated GF/C UniFilter plates (Perkin Elmer). Plates were dried for 15 min using a vacuum oven and Microscint 20 was added to each well before counting in a Perkin Elmer TopCount NXT HTS instrument. Specific binding was determined by taking the difference of total and non-specific counts. Non-specific wells contained 1 μM cold ligand. Data was analyzed and plotted using GraphPad Prism 7 as shown in FIG. 22.

### Example 8

### Internalization Assay

[0418] GLP-1R and GIPR internalization were assessed in CHOK1 cells expressing both human GLP-1R and GIPR. Cells were plated at a density of 25,000 cells/well in 96 well plates and cultured overnight at 37° C., 5% CO₂. Cells were serum starved in F12 media (Thermo Fisher) with 0.1% BSA for 4 hours prior to treatment. Cells were treated with 20 nM or dose titrations of GLP-1, GIP or bispecific conjugates for 30 minutes or the specified time in the respective figures. Cells were washed and fixed with 4% formaldehyde and permeabilized with 0.1% triton-X 100. To detect GIPR or GLP-1R, cells were first blocked with Odyssey blocking buffer (LiCor) for 1 hour at room temperature and incubated with 2 μg/ml of mouse anti-human GLP-1R (R&D systems) or 5 μg/ml of anti-human GIPR antibody (R&D Systems) at 4° C. overnight followed by AlexaFluor-555 or Alexa-Fluor 647 conjugated anti-mouse secondary antibody (Thermo Fisher) for GLP-1R or GIPR detection, respectively. Images (FIG. 23) were captured using Operetta high content Imaging system (Perkin Elmer) and analyzed by using the Harmony software (Perkin Elmer) to quantify the intracellular GLP-1R content (total spot area) as the readout parameter for the degree of internalization (FIG. 24).

### Example 9

### GLP-1R, GIPR and Bispecific Conjugate are Co-Localized Upon Internalization

[0419] U2OS cells expressing GIPR and SNAP-GLP-1R were plated at a density of 15,000 cells per well in 96 well plate and cultured overnight at 37° C. with 5% CO₂. Prior to treatment, cells were starved for 3.5 hours in McCoy's 5A media (Thermo Fisher) with 0.1% BSA. Prior to treatment, GLP-1R on the surface of U2OS cells were labeled with Alexa-Fluor 564 by incubating with SNAP-Surface Alexa-fluor 564 substrate (New England Biolabs) for 30 minutes. Cells were then washed to remove excess label and treated with 5 nM bispecific conjugates for 30 minutes. After 3 washes, cells were fixed with 4% formaldehyde and permeabilized with 0.1% triton-X 100 in PBS. For GIPR detection, cells were first blocked with Odyssey blocking buffer (LiCor) for 1 hour at room temperature and then incubated with 5 μg/ml of mouse anti-human GIPR (R&D Systems) at 4° C. overnight followed by incubation with Alexa-Fluor 647 conjugated anti-mouse secondary antibody (Thermo Fisher) for 1 hour at room temperature. Bispecific conjugate was detected using Alexa-Fluor labeled anti-Human Fc antibody. Hoechst 33342 were used for nuclei detection (Thermo Fisher). Images were captured using Operetta CLS high content Imaging system (Perkin Elmer) as shown in FIG. 25.

### Example 10

GloSensor cAMP Assay

[0420] The GloSensor cAMP assay was conducted per manufacturer's protocol (Promega). In brief, ChoK1 human GLP-1R/GIPR-expressing cells were seeded at 15,000 cells per well in a 96 well plate and incubated for 16 hours in a humidified 37° C., 5% CO₂ incubator. Cells were transiently transfected with 100 ng pGloSensor-22F cAMP plasmid using FuGENE HD for 24 hours. Cells were then equilibrated with 0.1% BSA, 2% GloSensor cAMP reagent in CO₂ independent media (Invitrogen) for 2 hours at room temperature. Cells were preincubated for 15 min with or without 0.43 M sucrose (Sigma). Basal luminescence measurements were taken for 10 minutes prior to addition of 1248 in conditions with or without sucrose. Immediately following addition of 1248, kinetic luminescence was measured using an integration time of 0.1-1 second every 60 seconds. Data were analyzed using GraphPad Prism software and presented in FIG. 26.

### Example 11

### FACS Analysis

[0421] CHOK1-GLP-1R H20, 293T-GIPR clone 10 and CHOK1-GLP-1R/GIPR cells were suspended at a density of 1×10⁶ cells in 100 ul of F12 assay media containing 1% FBS, 0.05% sodium azide and incubated with 10 ug/ml of indicated antibodies or anti-GIPR/GLP-1R bispecific conjugates for 1 hr at 4° C. Cells were washed one time with assay buffer and then incubated with 10 ug/ml of Alexa Fluor 647-goat anti-human Fc (Jackson) for 30 min at 4° C. The Fluorescence was measured using BD LSR II Flow Cytometer (BD Biosciences) and shown in FIG. 27.

### Example 12

### Calcium Flux Assay

[0422] CHOK1 cells expressing GIPR and GLP-1-R were plated at a density of 30,000 cells per well in 96 well black clear bottom plate and cultured overnight at 37° C. with 5% CO₂. Cells were serum starved in F12 media (Thermo Fisher) with 20 mM HEPES for 2 hours. Cells were then loaded with buffer containing the calcium-sensitive dye (BD Biosciences) and incubated for 1 hour at room temperature before being treated with dose titrations of GLP-1 or bispecific conjugates. Changes in intracellular calcium content were monitored for using a FLIPR (Molecular Devices). Maximum peak height in each well was recorded as representing calcium influx as shown in FIG. 28.

### Example 13

### Beta-Arrestin Assay

[0423] CHOK1 Pathhunter cells expressing ProLink™ tagged GLP-1R and GIPR from DiscoverX were transfected with un-tagged GIPR or GLP-1R, respectively. Cells were plated at a density of 20,000 cells per well in assay media (F12/0.1% BSA) and incubated at 37° C. overnight. Cells were treated with dose titrations of GLP-1, GIP or bispecific conjugates for 90 minutes. The working detection solution (DiscoverX) were then added to the cells and incubated for 60 min at room temp in the dark. Chemiluminescent signal representing beta-arrestin recruitments were measured using Envision and shown in FIG. 29.

### Example 14

### Human Pancreatic Islet Microtissues Glucose Stimulated Insulin Secretion (GSIS) Assay

[0424] Human pancreatic islet microtissues were purchased from InSphero in 96 well format. Microtissues were incubated for 16 hours in InSphero assay media. They were then treated for 1 hour with fresh KREBS buffer (129 mM NaCl, 4.8 mM KCl, 1.2 mM KH₂PO₄, 1.2 mM MgSO₄-7H₂O, 10 mM HEPES, 1.3 mM CaCl₂), 0.5% BSA, pH 7.4) with 2.8 mM glucose. Following 2 KREBS buffer washes, they were then incubated with KREBS buffer alone, 2.8 mM or 11 mM glucose in KREBS buffer with or without GLP-1 (Phoenix Pharmaceuticals) and a dose response of 1248 for 16 hours. Supernatant was collected and analyzed for insulin secretion according to manufacturer's protocol (Mercodia). Optical density was read at 450 nm on a TECAN microplate reader and shown in FIG. 30.

LENGTHY TABLES
The patent application contains a lengthy table section. A copy of the table is available in electronic form from the USPTO web site (https://seqdata.uspto.gov/?pageRequest=docDetail&DocID=US20250121056A1). An electronic copy of the table will also be available from the USPTO upon request and payment of the fee set forth in 37 CFR 1.19(b)(3).

1.-20. (canceled)

21. A method for reducing body weight in a human subject, the method comprising administering to the subject a composition comprising an intact human or humanized IgG antibody that specifically binds to the N-terminal extracellular domain of human Gastric Inhibitory Peptide Receptor (“GIPR”, and a Glucagon Like Polypeptide-1 (“GLP-1”) receptor agonist, wherein the GLP-1 receptor agonist is conjugated to the antibody or through a cysteine at one or more conjugation site(s) on the antibody.

22. The method of claim 21, wherein said administering is by parenteral injection.

23. The method of claim 21, wherein said administering is by subcutaneous injection.

24. A method for treating type 2 diabetes in a human subject, the method comprising administering to the subject a composition comprising an intact human or humanized IgG antibody that specifically binds to the N-terminal extracellular domain of human Gastric Inhibitory Peptide Receptor (“GIPR”), and a Glucagon Like Polypeptide-1 (“GLP-1”) receptor agonist, wherein the GLP-1 receptor agonist is conjugated to the antibody through a cysteine-at one or more conjugation site(s) on the antibody.

25. The method of claim 24, wherein said administering is by parenteral injection.

26. The method of claim 24, wherein said administering is by subcutaneous injection.

27. A method for reducing body weight gain in a human subject, the method comprising administering to the subject a composition comprising an intact human or humanized IgG antibody that specifically binds to the N-terminal extracellular domain of human Gastric Inhibitory Peptide Receptor (“GIPR”), and a Glucagon Like Polypeptide-1 (“GLP-1”) receptor agonist, wherein the GLP-1 receptor agonist is conjugated to the antibody through a cysteine-at one or more conjugation site(s) on the antibody.

28. The method of claim 27, wherein said administering is by parenteral injection.

29. The method of claim 27, wherein said administering is by subcutaneous injection.

The application's sequence listing, which the Patent Office published only in electronic form, follows.

SEQUENCE LISTING (3309 sequences)

SEQ ID NO: 1 - protein, 111 aa, synthetic construct
  REGION 1..111: note = Description of Artificial Sequence: Synthetic polypeptide
QSVLTQPPSASGTPGQRVTISCSGSSSNIGSNTVNWYQHLPGTAPKLLIYTNNQRPSGVPDRFSGSKSGTSASLAISGLQSEDEADYFCATFDDSLNGPVFGGGTKLTVLG

SEQ ID NO: 2 - protein, 108 aa, synthetic construct
  REGION 1..108: note = Description of Artificial Sequence: Synthetic polypeptide
DIQMTQSPSSLSASIGDRVTITCRASQDIRDYLGWYQQKPGKAPKRLIYGASSLQSGVPSRFSGSGSGTEFTLTISSLQPEDFATYYCLQHNNYPFTFGPGTKVDIKR

SEQ ID NO: 3 - protein, 108 aa, synthetic construct; identical to SEQ ID NO: 2
  REGION 1..108: note = Description of Artificial Sequence: Synthetic polypeptide

SEQ ID NO: 4 - protein, 107 aa, synthetic construct
  REGION 1..107: note = Description of Artificial Sequence: Synthetic polypeptide
DIQMTQSPSSLSASVGDRVTITCQASQDISNYLNWYQQKPGKAPKLLIYDASNLETGVPSRFSGSGSGTDFSFTISSLQPEDIATYYCQQYDILLTFGGGTKVEIKR

SEQ ID NO: 5 - protein, 114 aa, synthetic construct
  REGION 1..114: note = Description of Artificial Sequence: Synthetic polypeptide
DIVMTQSPDSLAVSLGERATINCKSSQSVLSSSNNKNYIAWYQQQPGHPPKLLIYWASTRESGVPDRFSGSGSGTDFTLTISSLQAEDVAVFYCQQYYSTPWTFGQGTKVEIKR

SEQ ID NO: 6 - protein, 114 aa, synthetic construct
  REGION 1..114: note = Description of Artificial Sequence: Synthetic polypeptide
DIVMTQSPDSLAVSLGERATINCKSSQSVLSSSNNKNYIAWYQQKPGHPPKLLIYWASTRESGVPDRFSGSGSGTDFTLTISSLQAEDVAVFYCQQYYSTPWTFGQGTKVEIKR

SEQ ID NO: 7 - protein, 114 aa, synthetic construct
  REGION 1..114: note = Description of Artificial Sequence: Synthetic polypeptide
DIVMTQSPDSLSVSLGERATINCKSSQSVLSSSNNKNYLAWYQQKPGQPPNLLIYWTSTRDSGVPDRFSGSGSGTDFTLTINSLQAEDVAVYYCQQYYRTPWTFGQGTKVEIKR

SEQ ID NO: 8 - protein, 114 aa, synthetic construct; identical to SEQ ID NO: 7
  REGION 1..114: note = Description of Artificial Sequence: Synthetic polypeptide

SEQ ID NO: 9 - protein, 109 aa, synthetic construct
  REGION 1..109: note = Description of Artificial Sequence: Synthetic polypeptide
EIVLTQSPGTLSLSPGERATLSCRASQSISYSYLAWYQQKPGQAPRLLIYGASSRATGIPDRFSGSGSGTDFTLTISRQEPDDFAVYYCQQYGSSPLTFGGGTKVEIKR

SEQ ID NO: 10 - protein, 108 aa, synthetic construct
  REGION 1..108: note = Description of Artificial Sequence: Synthetic polypeptide
EIVMTQSPATLSVSPGERATLSCRASQSVSSNLAWYQQKPGQAPRLLIYGAATRATGIPARVSGSGSGTEFTLTISSLQSEDFAVYYCQQYNNWPLTFGGGTKVEIKR

SEQ ID NO: 11 - protein, 108 aa, synthetic construct
  REGION 1..108: note = Description of Artificial Sequence: Synthetic polypeptide
DIQMTQSPSSLSASVGDRVTITCRASQGIRNELGWYQQKPGKAPKRLIYGASSLQSGVPSRFSGSGSGTEFTLTISSLQPEDFVTYYCLQHNSYPFTFGPGTKVDVKR

SEQ ID NO: 12 - protein, 107 aa, synthetic construct
  REGION 1..107: note = Description of Artificial Sequence: Synthetic polypeptide
DIQMTQSPSSLSASVGDRVTITCQASQDITNYLNWYQQKPGKAPKLLIYDASNLEPGVPSRFSGSGSGTDFTFTISSLQPEDIATYYCQQYDDLFTFGPGTKVDIKR

SEQ ID NO: 13 - protein, 108 aa, synthetic construct
  REGION 1..108: note = Description of Artificial Sequence: Synthetic polypeptide
DIQMTQSPSSVSASVGDRVTITCRASQGLIIWLAWYQQKPGKAPKLLIYAASSLQSGVPSRFSGSGSGTDFTLTISSLQPEDFATYYCQQTNSFPPTFGQGTKVEIKR

SEQ ID NO: 14 - protein, 108 aa, synthetic construct; identical to SEQ ID NO: 13
  REGION 1..108: note = Description of Artificial Sequence: Synthetic polypeptide

SEQ ID NO: 15 - protein, 108 aa, synthetic construct
  REGION 1..108: note = Description of Artificial Sequence: Synthetic polypeptide
DIQMTQSPSSLSASVGDRVTITCRASQGIRNELGWYQQKPGKAPKLLIYGASSLQSGVPSRFSGSGSGTEFTLTISSLQPEDFVTYYCLQHNSYPFTFGQGTKVDVKR

SEQ ID NO: 16 - protein, 108 aa, synthetic construct; identical to SEQ ID NO: 15
  REGION 1..108: note = Description of Artificial Sequence: Synthetic polypeptide

SEQ ID NO: 17 - protein, 108 aa, synthetic construct; identical to SEQ ID NO: 15
  REGION 1..108: note = Description of Artificial Sequence: Synthetic polypeptide

SEQ ID NO: 18 - protein, 108 aa, synthetic construct
  REGION 1..108: note = Description of Artificial Sequence: Synthetic polypeptide
DIQMTQSPSSLSASVGDRVTITCRASQGIRNELGWYQQKPGKAPKLLIYGASSLQSGVPSRFSGSGSGTEFTLTISSLQPEDFVTYYCLQHNSYPFTFGPGTKVDVKR

SEQ ID NO: 19 - protein, 108 aa, synthetic construct
  REGION 1..108: note = Description of Artificial Sequence: Synthetic polypeptide
DIQMTQSPSSLSASVGDRVTITCRASQGIRNELGWYQQKPGKAPKRLIYGASSLQSGVPSRFSGSGSGTEFTLTISSLQPEDFVTYYCLQHNSYPFTFGQGTKVDVKR

SEQ ID NO: 20 - protein, 108 aa, synthetic construct; identical to SEQ ID NO: 15
  REGION 1..108: note = Description of Artificial Sequence: Synthetic polypeptide

SEQ ID NO: 21 - protein, 108 aa, synthetic construct
  REGION 1..108: note = Description of Artificial Sequence: Synthetic polypeptide
DIQMTQSPSSLSASIGDRVTITCRASQDIRDYLGWYQQKPGKAPKLLIYGASSLQSGVPSRFSGSGSGTEFTLTISSLQPEDFATYYCLQHNNYPFTFGQGTKVDIKR

SEQ ID NO: 22 - protein, 108 aa, synthetic construct
  REGION 1..108: note = Description of Artificial Sequence: Synthetic polypeptide
DIQMTQSPSSLSASIGDRVTITCRASQDIRDYLGWYQQKPGKAPKRLIYGASSLQSGVPSRFSGSGSGTEFTLTISSLQPEDFATYYCLQHNNYPFTFGQGTKVDIKR

SEQ ID NO: 23 - protein, 108 aa, synthetic construct
  REGION 1..108: note = Description of Artificial Sequence: Synthetic polypeptide
DIQMTQSPSSLSASIGDRVTITCRASQDIRDYLGWYQQKPGKAPKLLIYGASSLQSGVPSRFSGSGSGTEFTLTISSLQPEDFATYYCLQHNNYPFTFGPGTKVDIKR

SEQ ID NO: 24 - protein, 108 aa, synthetic construct; identical to SEQ ID NO: 21
  REGION 1..108: note = Description of Artificial Sequence: Synthetic polypeptide

SEQ ID NO: 25 - protein, 108 aa, synthetic construct; identical to SEQ ID NO: 21
  REGION 1..108: note = Description of Artificial Sequence: Synthetic polypeptide

SEQ ID NO: 26 - protein, 108 aa, synthetic construct; identical to SEQ ID NO: 21
  REGION 1..108: note = Description of Artificial Sequence: Synthetic polypeptide

SEQ ID NO: 27 - protein, 108 aa, synthetic construct; identical to SEQ ID NO: 21
  REGION 1..108: note = Description of Artificial Sequence: Synthetic polypeptide

SEQ ID NO: 28 - protein, 108 aa, synthetic construct
  REGION 1..108: note = Description of Artificial Sequence: Synthetic polypeptide
DIQMTQSPSSLSASIGDRVTITCRASQDLRNYLGWYHQKPGKAPKRLIYGASSLQSGVPSRFSGSGSGTEFTLTISSLQPEDFATYYCLQHNNYPFTFGPGTKVDIKR

SEQ ID NO: 29 - protein, 108 aa, synthetic construct
  REGION 1..108: note = Description of Artificial Sequence: Synthetic polypeptide
DIQMTQSPSSLSASIGDRVTITCRASQDLRNYLGWYQQKPGKAPKLLIYGASSLQSGVPSRFSGSGSGTEFTLTISSLQPEDFATYYCLQHNNYPFTFGPGTKVDIKR

SEQ ID NO: 30 - protein, 108 aa, synthetic construct; identical to SEQ ID NO: 29
  REGION 1..108: note = Description of Artificial Sequence: Synthetic polypeptide

SEQ ID NO: 31 - protein, 108 aa, synthetic construct
  REGION 1..108: note = Description of Artificial Sequence: Synthetic polypeptide
DIQMTQSPSSLSASIGDRVTITCRASQDLRNYLGWYHQKPGKAPKLLIYGASSLQSGVPSRFSGSGSGTEFTLTISSLQPEDFATYYCLQHNNYPFTFGPGTKVDIKR

SEQ ID NO: 32 - protein, 108 aa, synthetic construct
  REGION 1..108: note = Description of Artificial Sequence: Synthetic polypeptide
DIQMTQSPSSLSASIGDRVTITCRASQDLRNYLGWYQQKPGKAPKRLIYGASSLQSGVPSRFSGSGSGTEFTLTISSLQPEDFATYYCLQHNNYPFTFGPGTKVDIKR

SEQ ID NO: 33 - protein, 108 aa, synthetic construct; identical to SEQ ID NO: 32
  REGION 1..108: note = Description of Artificial Sequence: Synthetic polypeptide

SEQ ID NO: 34 - protein, 108 aa, synthetic construct; identical to SEQ ID NO: 31
  REGION 1..108: note = Description of Artificial Sequence: Synthetic polypeptide

SEQ ID NO: 35 - protein, 108 aa, synthetic construct; identical to SEQ ID NO: 28
  REGION 1..108: note = Description of Artificial Sequence: Synthetic polypeptide

SEQ ID NO: 36 - protein, 108 aa, synthetic construct; identical to SEQ ID NO: 29
  REGION 1..108: note = Description of Artificial Sequence: Synthetic polypeptide

SEQ ID NO: 37 - protein, 108 aa, synthetic construct; identical to SEQ ID NO: 29
  REGION 1..108: note = Description of Artificial Sequence: Synthetic polypeptide

SEQ ID NO: 38 - protein, 108 aa, synthetic construct
  REGION 1..108: note = Description of Artificial Sequence: Synthetic polypeptide
DIQMTQSPSSLSASIGDRVTITCRASQDLRNYLGWYQQKPGKAPKLLIYGASSLQSGVPSRFSGSGSGTEFTLTISSLQPEDFATYYCLQHNNYPFTFGQGTKVDIKR

SEQ ID NO: 39 - protein, 108 aa, synthetic construct; identical to SEQ ID NO: 29
  REGION 1..108: note = Description of Artificial Sequence: Synthetic polypeptide

SEQ ID NO: 40 - protein, 107 aa, synthetic construct
  REGION 1..107: note = Description of Artificial Sequence: Synthetic polypeptide
DIQMTQSPSSLSASVGDRVTITCQASQDISNYLNWYQQKPGKAPKLLIYDASNLETGVPSRFSGSGSGTDFSLTISSLQPEDFATYYCQQYDILLTFGGGTKVEIKR

SEQ ID NO: 41 - protein, 107 aa, synthetic construct; identical to SEQ ID NO: 40
  REGION 1..107: note = Description of Artificial Sequence: Synthetic polypeptide

SEQ ID NO: 42 - protein, 107 aa, synthetic construct
  REGION 1..107: note = Description of Artificial Sequence: Synthetic polypeptide
DIQMTQSPSSLSASVGDRVTITCQASQDISNYLNWYQQKPGKAPKLLIYDASNLETGVPSRFSGSGSGTDFSLTISSLQPEDIATYYCQQYDILLTFGGGTKVEIKR

SEQ ID NO: 43 - protein, 107 aa, synthetic construct
  REGION 1..107: note = Description of Artificial Sequence: Synthetic polypeptide
DIQMTQSPSSLSASVGDRVTITCQASQDISNYLNWYQQKPGKAPKLLIYDASNLETGVPSRFSGSGSGTDFSFTISSLQPEDFATYYCQQYDILLTFGGGTKVEIKR

SEQ ID NO: 44 - protein, 107 aa, synthetic construct; identical to SEQ ID NO: 42
  REGION 1..107: note = Description of Artificial Sequence: Synthetic polypeptide

SEQ ID NO: 45 - protein, 107 aa, synthetic construct; identical to SEQ ID NO: 43
  REGION 1..107: note = Description of Artificial Sequence: Synthetic polypeptide

SEQ ID NO: 46 - protein, 107 aa, synthetic construct; identical to SEQ ID NO: 4
  REGION 1..107: note = Description of Artificial Sequence: Synthetic polypeptide

SEQ ID NO: 47 - protein, 107 aa, synthetic construct; identical to SEQ ID NO: 40
  REGION 1..107: note = Description of Artificial Sequence: Synthetic polypeptide

SEQ ID NO: 48 - protein, 107 aa, synthetic construct; identical to SEQ ID NO: 40
  REGION 1..107: note = Description of Artificial Sequence: Synthetic polypeptide

SEQ ID NO: 49 - protein, 108 aa, synthetic construct; identical to SEQ ID NO: 2
  REGION 1..108: note = Description of Artificial Sequence: Synthetic polypeptide

SEQ ID NO: 50 - protein, 108 aa, synthetic construct; identical to SEQ ID NO: 2
  REGION 1..108: note = Description of Artificial Sequence: Synthetic polypeptide

SEQ ID NO: 51 - protein, 108 aa, synthetic construct; identical to SEQ ID NO: 21
  REGION 1..108: note = Description of Artificial Sequence: Synthetic polypeptide

SEQ ID NO: 52 - protein, 108 aa, synthetic construct; identical to SEQ ID NO: 21
  REGION 1..108: note = Description of Artificial Sequence: Synthetic polypeptide

SEQ ID NO: 53 - protein, 108 aa, synthetic construct; identical to SEQ ID NO: 23
  REGION 1..108: note = Description of Artificial Sequence: Synthetic polypeptide

SEQ ID NO: 54 - protein, 108 aa, synthetic construct; identical to SEQ ID NO: 23
  REGION 1..108: note = Description of Artificial Sequence: Synthetic polypeptide

SEQ ID NO: 55 - protein, 108 aa, synthetic construct; identical to SEQ ID NO: 23
  REGION 1..108: note = Description of Artificial Sequence: Synthetic polypeptide

SEQ ID NO: 56 - protein, 107 aa, synthetic construct
  REGION 1..107: note = Description of Artificial Sequence: Synthetic polypeptide
DIQMTQSPSSLSASVGDRVTITCQASQDITNYLNWYQQKPGKAPKLLIYDASNLEPGVPSRFSGSGSGTDFTLTISSLQPEDFATYYCQQYDDLFTFGPGTKVDIKR

SEQ ID NO: 57 - protein, 107 aa, synthetic construct
  REGION 1..107: note = Description of Artificial Sequence: Synthetic polypeptide
DIQMTQSPSSLSASVGDRVTITCQASQDITNYLNWYQQKPGKAPKLLIYDASNLEPGVPSRFSGSGSGTDFTLTISSLQPEDIATYYCQQYDDLFTFGPGTKVDIKR

SEQ ID NO: 58 - protein, 107 aa, synthetic construct; identical to SEQ ID NO: 56
  REGION 1..107: note = Description of Artificial Sequence: Synthetic polypeptide

SEQ ID NO: 59 - protein, 107 aa, synthetic construct
  REGION 1..107: note = Description of Artificial Sequence: Synthetic polypeptide
DIQMTQSPSSLSASVGDRVTITCQASQDITNYLNWYQQKPGKAPKLLIYDASNLEPGVPSRFSGSGSGTDFTFTISSLQPEDFATYYCQQYDDLFTFGPGTKVDIKR

SEQ ID NO: 60 - protein, 107 aa, synthetic construct; identical to SEQ ID NO: 57
  REGION 1..107: note = Description of Artificial Sequence: Synthetic polypeptide

SEQ ID NO: 61 - protein, 107 aa, synthetic construct; identical to SEQ ID NO: 59
  REGION 1..107: note = Description of Artificial Sequence: Synthetic polypeptide

SEQ ID NO: 62 - protein, 107 aa, synthetic construct; identical to SEQ ID NO: 12
  REGION 1..107: note = Description of Artificial Sequence: Synthetic polypeptide

SEQ ID NO: 63 - protein, 107 aa, synthetic construct; identical to SEQ ID NO: 56
  REGION 1..107: note = Description of Artificial Sequence: Synthetic polypeptide

SEQ ID NO: 64 - protein, 107 aa, synthetic construct; identical to SEQ ID NO: 56
  REGION 1..107: note = Description of Artificial Sequence: Synthetic polypeptide

SEQ ID NO: 65 - protein, 107 aa, synthetic construct
  REGION 1..107: note = Description of Artificial Sequence: Synthetic polypeptide
DIQMTQSPSSLSASVGDRVTITCQASQDITNYLNWYQQKPGKAPKLLIYDASNLEPGVPSRFSGSGSGTDFTLTISSLQPEDFATYYCQQYDDLFTFGQGTKVDIKR

SEQ ID NO: 66 - protein, 107 aa, synthetic construct; identical to SEQ ID NO: 65
  REGION 1..107: note = Description of Artificial Sequence: Synthetic polypeptide

SEQ ID NO: 67 - protein, 108 aa, synthetic construct
  REGION 1..108: note = Description of Artificial Sequence: Synthetic polypeptide
EIVLTQSPGTLSLSPGERATLSCRASQIFTSTYLAWYQQKPGQAPRLLIYGASSRATGIPDRFSGSGSGTDFTLTISRLEPEDFAVYYCQQYGSSPRFGQGTRLEIKR

SEQ ID NO: 68 - protein, 108 aa, synthetic construct; identical to SEQ ID NO: 67
  REGION 1..108: note = Description of Artificial Sequence: Synthetic polypeptide

SEQ ID NO: 69 - protein, 108 aa, synthetic construct; identical to SEQ ID NO: 67
  REGION 1..108: note = Description of Artificial Sequence: Synthetic polypeptide

SEQ ID NO: 70 - protein, 108 aa, synthetic construct; identical to SEQ ID NO: 67
  REGION 1..108: note = Description of Artificial Sequence: Synthetic polypeptide

SEQ ID NO: 71 - protein, 108 aa, synthetic construct
  REGION 1..108: note = Description of Artificial Sequence: Synthetic polypeptide
EIVMTQSPATLSVSPGERATLSCRASQSVSSNLAWYQQKPGQAPRLLIYGAATRATGIPARFSGSGSGTEFTLTISSLQSEDFAVYYCQQYNNWPLTFGGGTKVEIKR

SEQ ID NO: 72 - protein, 108 aa, synthetic construct; identical to SEQ ID NO: 71
  REGION 1..108: note = Description of Artificial Sequence: Synthetic polypeptide

SEQ ID NO: 73 - protein, 108 aa, synthetic construct; identical to SEQ ID NO: 71
  REGION 1..108: note = Description of Artificial Sequence: Synthetic polypeptide

SEQ ID NO: 74 - protein, 108 aa, synthetic construct; identical to SEQ ID NO: 10
  REGION 1..108: note = Description of Artificial Sequence: Synthetic polypeptide

SEQ ID NO: 75 - protein, 108 aa, synthetic construct
  REGION 1..108: note = Description of Artificial Sequence: Synthetic polypeptide
EIVMTQSPATLSVSPGERATLSCRASQSVSSNLAWYQQKPGQAPRLLIYGAATRATGIPARFSGSGSGTEFTLTISSLEPEDFAVYYCQQYNNFPLTFGGGTKVEIKR

SEQ ID NO: 76 - protein, 108 aa, synthetic construct
  REGION 1..108: note = Description of Artificial Sequence: Synthetic polypeptide
EIVMTQSPATLSVSPGERATLSCRASQSVSSNLAWYQQKPGQAPRLLIYGAATRATGIPARFSGSGSGTEFTLTISSLEPEDFAVYYCQQYNNYPLTFGGGTKVEIKR

SEQ ID NO: 77 - protein, 108 aa, synthetic construct
  REGION 1..108: note = Description of Artificial Sequence: Synthetic polypeptide
EIVMTQSPATLSVSPGERATLSCRASQSVSSNLAWYQQKPGQAPRLLIYGAATRATGIPARFSGSGSGTEFTLTISSLEPEDFAVYYCQQYNNWPLTFGGGTKVEIKR

SEQ ID NO: 78 - protein, 108 aa, synthetic construct; identical to SEQ ID NO: 77
  REGION 1..108: note = Description of Artificial Sequence: Synthetic polypeptide

SEQ ID NO: 79 - protein, 109 aa, synthetic construct
  REGION 1..109: note = Description of Artificial Sequence: Synthetic polypeptide
EIVLTQSPGTLSLSPGERATLSCRASQSISYSYLAWYQQKPGQAPRLLIYGASSRATGIPDRFSGSGSGTDFTLTISRLEPDDFAVYYCQQYGSSPLTFGGGTKVEIKR

SEQ ID NO: 80 - protein, 109 aa, synthetic construct; identical to SEQ ID NO: 9
  REGION 1..109: note = Description of Artificial Sequence: Synthetic polypeptide

SEQ ID NO: 81 - protein, 109 aa, synthetic construct; identical to SEQ ID NO: 79
  REGION 1..109: note = Description of Artificial Sequence: Synthetic polypeptide

SEQ ID NO: 82 - protein, 109 aa, synthetic construct; identical to SEQ ID NO: 79
  REGION 1..109: note = Description of Artificial Sequence: Synthetic polypeptide

SEQ ID NO: 83 - protein, 109 aa, synthetic construct; identical to SEQ ID NO: 79
  REGION 1..109: note = Description of Artificial Sequence: Synthetic polypeptide

SEQ ID NO: 84 - protein, 109 aa, synthetic construct; identical to SEQ ID NO: 9
  REGION 1..109: note = Description of Artificial Sequence: Synthetic polypeptide

SEQ ID NO: 85 - protein, 109 aa, synthetic construct; identical to SEQ ID NO: 9
  REGION 1..109: note = Description of Artificial Sequence: Synthetic polypeptide

SEQ ID NO: 86 - protein, 114 aa, synthetic construct; identical to SEQ ID NO: 5
  REGION 1..114: note = Description of Artificial Sequence: Synthetic polypeptide

SEQ ID NO: 87 - protein, 114 aa, synthetic construct; identical to SEQ ID NO: 5
  REGION 1..114: note = Description of Artificial Sequence: Synthetic polypeptide

SEQ ID NO: 88 - protein, 114 aa, synthetic construct; identical to SEQ ID NO: 5
  REGION 1..114: note = Description of Artificial Sequence: Synthetic polypeptide

SEQ ID NO: 89 - protein, 114 aa, synthetic construct; identical to SEQ ID NO: 5
  REGION 1..114: note = Description of Artificial Sequence: Synthetic polypeptide

SEQ ID NO: 90 - protein, 114 aa, synthetic construct; identical to SEQ ID NO: 5
  REGION 1..114: note = Description of Artificial Sequence: Synthetic polypeptide

SEQ ID NO: 91 - protein, 114 aa, synthetic construct; identical to SEQ ID NO: 5
  REGION 1..114: note = Description of Artificial Sequence: Synthetic polypeptide

SEQ ID NO: 92 - protein, 114 aa, synthetic construct; identical to SEQ ID NO: 5
  REGION 1..114: note = Description of Artificial Sequence: Synthetic polypeptide

SEQ ID NO: 93 - protein, 114 aa, synthetic construct; identical to SEQ ID NO: 5
  REGION 1..114: note = Description of Artificial Sequence: Synthetic polypeptide

SEQ ID NO: 94 - protein, 114 aa, synthetic construct; identical to SEQ ID NO: 5
  REGION 1..114: note = Description of Artificial Sequence: Synthetic polypeptide

SEQ ID NO: 95 - protein, 114 aa, synthetic construct
  REGION 1..114: note = Description of Artificial Sequence: Synthetic polypeptide
DIVMTQSPDSLAVSLGERATINCKSSQSVLSSSNNKNYIAWYQQKPGQPPKLLIYWASTRESGVPDRFSGSGSGTDFTLTISSLQAEDVAVFYCQQYYSTPWTFGQGTKVEIKR

SEQ ID NO: 96 - protein, 114 aa, synthetic construct; identical to SEQ ID NO: 95
  REGION 1..114: note = Description of Artificial Sequence: Synthetic polypeptide

SEQ ID NO: 97 - protein, 114 aa, synthetic construct
  REGION 1..114: note = Description of Artificial Sequence: Synthetic polypeptide
DIVMTQSPDSLSVSLGERATINCKSSQSVLSSSNNKNYLAWYQQKPGQPPNLLIYWTSTRESGVPDRFSGSGSGTDFTLTINSLQAEDVAVYYCQQYYRTPWTFGQGTKVEIKR

SEQ ID NO: 98 - protein, 114 aa, synthetic construct; identical to SEQ ID NO: 97
  REGION 1..114: note = Description of Artificial Sequence: Synthetic polypeptide

SEQ ID NO: 99 - protein, 114 aa, synthetic construct; identical to SEQ ID NO: 7
  REGION 1..114: note = Description of Artificial Sequence: Synthetic polypeptide

SEQ ID NO: 100 - protein, 114 aa, synthetic construct; identical to SEQ ID NO: 97
  REGION 1..114: note = Description of Artificial Sequence: Synthetic polypeptide

SEQ ID NO: 101 - protein, 114 aa, synthetic construct; identical to SEQ ID NO: 97
  REGION 1..114: note = Description of Artificial Sequence: Synthetic polypeptide

SEQ ID NO: 102 - protein, 114 aa, synthetic construct; identical to SEQ ID NO: 7
  REGION 1..114: note = Description of Artificial Sequence: Synthetic polypeptide

SEQ ID NO: 103 - protein, 114 aa, synthetic construct; identical to SEQ ID NO: 7
  REGION 1..114: note = Description of Artificial Sequence: Synthetic polypeptide

SEQ ID NO: 104 - protein, 114 aa, synthetic construct
  REGION 1..114: note = Description of Artificial Sequence: Synthetic polypeptide
DIVMTQSPDSLAVSLGERATINCKSSQSVLSSSNNKNYLAWYQQKPGQPPKLLIYWTSTRESGVPDRFSGSGSGTDFTLTINSLQAEDVAVYYCQQYYRTPWTFGQGTKVEIKR

SEQ ID NO: 105 - protein, 114 aa, synthetic construct; identical to SEQ ID NO: 97
  REGION 1..114: note = Description of Artificial Sequence: Synthetic polypeptide

SEQ ID NO: 106 - protein, 114 aa, synthetic construct; identical to SEQ ID NO: 6
  REGION 1..114: note = Description of Artificial Sequence: Synthetic polypeptide

SEQ ID NO: 107 - protein, 114 aa, synthetic construct; identical to SEQ ID NO: 6
  REGION 1..114: note = Description of Artificial Sequence: Synthetic polypeptide

SEQ ID NO: 108 - protein, 114 aa, synthetic construct; identical to SEQ ID NO: 6
  REGION 1..114: note = Description of Artificial Sequence: Synthetic polypeptide

SEQ ID NO: 109 - protein, 114 aa, synthetic construct; identical to SEQ ID NO: 95
  REGION 1..114: note = Description of Artificial Sequence: Synthetic polypeptide

SEQ ID NO: 110 - protein, 114 aa, synthetic construct; identical to SEQ ID NO: 95
  REGION 1..114: note = Description of Artificial Sequence: Synthetic polypeptide

SEQ ID NO: 111 - protein, 114 aa, synthetic construct; identical to SEQ ID NO: 7
  REGION 1..114: note = Description of Artificial Sequence: Synthetic polypeptide

SEQ ID NO: 112 - protein, 114 aa, synthetic construct; identical to SEQ ID NO: 7
  REGION 1..114: note = Description of Artificial Sequence: Synthetic polypeptide

SEQ ID NO: 113 - protein, 114 aa, synthetic construct; identical to SEQ ID NO: 7
  REGION 1..114: note = Description of Artificial Sequence: Synthetic polypeptide

SEQ ID NO: 114 - protein, 114 aa, synthetic construct; identical to SEQ ID NO: 7
  REGION 1..114: note = Description of Artificial Sequence: Synthetic polypeptide

SEQ ID NO: 115 - protein, 114 aa, synthetic construct; identical to SEQ ID NO: 7
  REGION 1..114: note = Description of Artificial Sequence: Synthetic polypeptide

SEQ ID NO: 116 - protein, 114 aa, synthetic construct; identical to SEQ ID NO: 7
  REGION 1..114: note = Description of Artificial Sequence: Synthetic polypeptide

SEQ ID NO: 117 - protein, 114 aa, synthetic construct; identical to SEQ ID NO: 7
  REGION 1..114: note = Description of Artificial Sequence: Synthetic polypeptide

SEQ ID NO: 118 - protein, 114 aa, synthetic construct; identical to SEQ ID NO: 97
  REGION 1..114: note = Description of Artificial Sequence: Synthetic polypeptide

SEQ ID NO: 119 - protein, 114 aa, synthetic construct; identical to SEQ ID NO: 97
  REGION 1..114: note = Description of Artificial Sequence: Synthetic polypeptide

SEQ ID NO: 120 - protein, 114 aa, synthetic construct; identical to SEQ ID NO: 97
  REGION 1..114: note = Description of Artificial Sequence: Synthetic polypeptide

SEQ ID NO: 121 - protein, 114 aa, synthetic construct; identical to SEQ ID NO: 97
  REGION 1..114: note = Description of Artificial Sequence: Synthetic polypeptide

SEQ ID NO: 122 - protein, 114 aa, synthetic construct
  REGION 1..114: note = Description of Artificial Sequence: Synthetic polypeptide
DIVMTQSPDSLAVSLGERATINCKSSQSVLSSSNNKNYLAWYQQKPGQPPKLLIYWTSTRDSGVPDRFSGSGSGTDFTLTINSLQAEDVAVYYCQQYYRTPWTFGQGTKVEIKR

SEQ ID NO: 123 - protein, 114 aa, synthetic construct; identical to SEQ ID NO: 104
  REGION 1..114: note = Description of Artificial Sequence: Synthetic polypeptide

SEQ ID NO: 124 - protein, 111 aa, synthetic construct
  REGION 1..111: note = Description of Artificial Sequence: Synthetic polypeptide
QSVLTQPPSASGTPGQRVTISCSGSSSNIGSQTVNWYQHLPGTAPKLLIYTNNQRPSGVPDRFSGSKSGTSASLAISGLQSEDEADYFCATFDESLSGPVFGGGTKLTVLG

SEQ ID NO: 125 - protein, 111 aa, synthetic construct
  REGION 1..111: note = Description of Artificial Sequence: Synthetic polypeptide
QSVLTQPPSASGTPGQRVTISCSGSSSNIGSQTVNWYQHLPGTAPKLLIYTNNQRPSGVPDRFSGSKSGTSASLAISGLQSEDEADYFCATFDESLQGPVFGGGTKLTVLG

SEQ ID NO: 126 - protein, 111 aa, synthetic construct
  REGION 1..111: note = Description of Artificial Sequence: Synthetic polypeptide
QSVLTQPPSASGTPGQRVTISCSGSSSNIGSNYVNWYQHLPGTAPKLLIYTNNQRPSGVPDRFSGSKSGTSASLAISGLQSEDEADYFCATFDESLSGPVFGGGTKLTVLG

SEQ ID NO: 127 - protein, 111 aa, synthetic construct
  REGION 1..111: note = Description of Artificial Sequence: Synthetic polypeptide
QSVLTQPPSASGTPGQRVTISCSGSSSNIGSNYVNWYQHLPGTAPKLLIYTNNQRPSGVPDRFSGSKSGTSASLAISGLQSEDEADYFCATFDESLQGPVFGGGTKLTVLG

SEQ ID NO: 128 - protein, 111 aa, synthetic construct
  REGION 1..111: note = Description of Artificial Sequence: Synthetic polypeptide
QSVLTQPPSASGTPGQRVTISCSGSSSNIGSQTVNWYQHLPGTAPKLLIYTNNQRPSGVPDRFSGSKSGTSASLAISGLQSEDEADYFCATFDDSLNGPVFGGGTKLTVLG

SEQ ID NO: 129 - protein, 111 aa, synthetic construct
  REGION 1..111: note = Description of Artificial Sequence: Synthetic polypeptide
QSVLTQPPSASGTPGQRVTISCSGSSSNIGSNYVNWYQHLPGTAPKLLIYTNNQRPSGVPDRFSGSKSGTSASLAISGLQSEDEADYFCATFDDSLNGPVFGGGTKLTVLG

SEQ ID NO: 130 - protein, 111 aa, synthetic construct
  REGION 1..111: note = Description of Artificial Sequence: Synthetic polypeptide
QSVLTQPPSASGTPGQRVTISCSGSSSNIGSNTVNWYQHLPGTAPKLLIYTNNQRPSGVPDRFSGSKSGTSASLAISGLQSEDEADYFCATFDESLNGPVFGGGTKLTVLG

SEQ ID NO: 131 - protein, 111 aa, synthetic construct
  REGION 1..111: note = Description of Artificial Sequence: Synthetic polypeptide
QSVLTQPPSASGTPGQRVTISCSGSSSNIGSNTVNWYQHLPGTAPKLLIYTNNQRPSGVPDRFSGSKSGTSASLAISGLQSEDEADYFCATFDDSLQGPVFGGGTKLTVLG

SEQ ID NO: 132 - protein, 111 aa, synthetic construct
  REGION 1..111: note = Description of Artificial Sequence: Synthetic polypeptide
QSVLTQPPSASGTPGQRVTISCSGSSSNIGSNTVNWYQHLPGTAPKLLIYTNNQRPSGVPDRFSGSKSGTSASLAISGLQSEDEADYFCATFDDSLSGPVFGGGTKLTVLG

SEQ ID NO: 133 - protein, 111 aa, synthetic construct
  REGION 1..111: note = Description of Artificial Sequence: Synthetic polypeptide
QSVLTQPPSASGTPGQRVTISCSGSSSNIGSNTVNWYQHLPGTAPKLLIYTNNQRPSGVPDRFSGSKSGTSASLAISGLQSEDEADYFCATFDDSLNAPVFGGGTKLTVLG

SEQ ID NO: 134 - protein, 111 aa, synthetic construct
  REGION 1..111: note = Description of Artificial Sequence: Synthetic polypeptide
QSVLTQPPSASGTPGQRVTISCSGSSSNIGSNTVNWYQHLPGTAPKLLIYTNNQRPSGVPDRFSGSKSGTSASLAISGLQSEDEADYFCATFDSSLNGPVFGGGTKLTVLG

SEQ ID NO: 135 - protein, 111 aa, synthetic construct
  REGION 1..111: note = Description of Artificial Sequence: Synthetic polypeptide
QSVLTQPPSASGTPGQRVTISCSGSSSNIGSNYVNWYQHLPGTAPKLLIYTNNQRPSGVPDRFSGSKSGTSASLAISGLQSEDEADYFCATFDSSLNAPVFGGGTKLTVLG

SEQ ID NO: 136 - protein, 111 aa, synthetic construct; identical to SEQ ID NO: 135
  REGION 1..111: note = Description of Artificial Sequence: Synthetic polypeptide

SEQ ID NO: 137 - protein, 111 aa, synthetic construct; identical to SEQ ID NO: 124
  REGION 1..111: note = Description of Artificial Sequence: Synthetic polypeptide

SEQ ID NO: 138 - protein, 108 aa, synthetic construct
  REGION 1..108: note = Description of Artificial Sequence: Synthetic polypeptide
DIQMTQSPSSLSASIGDRVTITCRASQDLRNYLGWYQQKPGKAPKRLIYGASSLQSGVPSRFSGSGSGTEFTLTISSLQPEDFATYYCLQHNNYPFTFGQGTKVDIKR

SEQ ID NO: 139 - protein, 108 aa, synthetic construct; identical to SEQ ID NO: 22
  REGION 1..108: note = Description of Artificial Sequence: Synthetic polypeptide

SEQ ID NO: 140 - protein, 111 aa, synthetic construct
  REGION 1..111: note = Description of Artificial Sequence: Synthetic polypeptide
QSVLTQPPSASGTPGQRVTISCSGSSSNIGSNTVNWYQQLPGTAPKLLIYTNNQRPSGVPDRFSGSKSGTSASLAISGLQSEDEADYFCATFDSSLSGPVFGGGTKLTVLG

SEQ ID NO: 141 - protein, 108 aa, synthetic construct
  REGION 1..108: note = Description of Artificial Sequence: Synthetic polypeptide
DIQLTQSPSSLSASVGDRVTITCRASQTISRFLNWYQQKPGKAPELLIYVASSLQSGVPSRFSGSGSGTDFTLTISSLQPEDFATYYCQQSYSTLISFGQGTKLEITR

SEQ ID NO: 142 - protein, 111 aa, synthetic construct
  REGION 1..111: note = Description of Artificial Sequence: Synthetic polypeptide
QSVLTQPPSVSAAPGQKVTISCSGSSSNIGNNYVSWYEQFPGTAPKLLIYDNNKRPSGIPDRFSGSKSGTSATLGITGLQTGDEADYYCGTWDSSLSAVVFGGGTKLTVLG

SEQ ID NO: 143 - protein, 108 aa, synthetic construct
  REGION 1..108: note = Description of Artificial Sequence: Synthetic polypeptide
DIQLTQSPSSLSASVGDRVTITCRASQTISRFLNWYQQKPGKAPELLIYVASSLQSGVPSRFSGSGSGTDFTLTISSLQPEDFATYYCQQSYSTLISFGQGTKLEIKR

SEQ ID NO: 144 - protein, 108 aa, synthetic construct; identical to SEQ ID NO: 143
  REGION 1..108: note = Description of Artificial Sequence: Synthetic polypeptide

SEQ ID NO: 145 - protein, 108 aa, synthetic construct; identical to SEQ ID NO: 141
  REGION 1..108: note = Description of Artificial Sequence: Synthetic polypeptide

SEQ ID NO: 146 - protein, 108 aa, synthetic construct
  REGION 1..108: note = Description of Artificial Sequence: Synthetic polypeptide
DIQLTQSPSSLSASVGDRVTITCRASQTISRFLNWYQQKPGKAPKLLIYVASSLQSGVPSRFSGSGSGTDFTLTISSLQPEDFATYYCQQSYSTLISFGQGTKLEIKR

SEQ ID NO: 147 - protein, 108 aa, synthetic construct; identical to SEQ ID NO: 143
  REGION 1..108: note = Description of Artificial Sequence: Synthetic polypeptide

SEQ ID NO: 148 - protein, 108 aa, synthetic construct; identical to SEQ ID NO: 143
  REGION 1..108: note = Description of Artificial Sequence: Synthetic polypeptide

SEQ ID NO: 149 - protein, 111 aa, synthetic construct
  REGION 1..111: note = Description of Artificial Sequence: Synthetic polypeptide
QSVLTQPPSVSAAPGQKVTISCSGSSSNIGNNYVSWYQQLPGTAPKLLIYDNNKRPSGIPDRFSGSKSGTSATLGITGLQTGDEADYYCGTWDSSLSAVVFGGGTKLTVLG

SEQ ID NO: 150 - protein, 111 aa, synthetic construct; identical to SEQ ID NO: 149
  REGION 1..111: note = Description of Artificial Sequence: Synthetic polypeptide

SEQ ID NO: 151 - protein, 111 aa, synthetic construct; identical to SEQ ID NO: 142
  REGION 1..111: note = Description of Artificial Sequence: Synthetic polypeptide

SEQ ID NO: 152 - protein, 111 aa, synthetic construct
  REGION 1..111: note = Description of Artificial Sequence: Synthetic polypeptide
QSVLTQPPSVSAAPGQKVTISCSGSSSNIGNNYVSWYQQLPGTAPKLLIYDNNKRPSGIPDRFSGSKSGTSATLAITGLQTGDEADYYCGTFESSLSAVVFGGGTKLTVLG

SEQ ID NO: 153 - protein, 111 aa, synthetic construct
  REGION 1..111: note = Description of Artificial Sequence: Synthetic polypeptide
QSVLTQPPSVSAAPGQKVTISCSGSSSNIGNNYVSWYQQLPGTAPKLLIYDNNKRPSGIPDRFSGSKSGTSATLAITGLQTGDEADYYCGTWDSSLSAVVFGGGTKLTVLG

SEQ ID NO: 154 - protein, 111 aa, synthetic construct; identical to SEQ ID NO: 153
  REGION 1..111: note = Description of Artificial Sequence: Synthetic polypeptide

SEQ ID NO: 155 - protein, 111 aa, synthetic construct; identical to SEQ ID NO: 149
  REGION 1..111: note = Description of Artificial Sequence: Synthetic polypeptide

SEQ ID NO: 156 - protein, 111 aa, synthetic construct; identical to SEQ ID NO: 152
  REGION 1..111: note = Description of Artificial Sequence: Synthetic polypeptide

SEQ ID NO: 157 - protein, 108 aa, synthetic construct
  REGION 1..108: note = Description of Artificial Sequence: Synthetic polypeptide
DIQLTQSPSSLSASVGDRVTITCRASQTISRFLNWYQQKPGKAPKLLIYVASSLQSGVPSRFSGSGSGTDFTLTISSLQPEDFATYYCQQSYSTLLSFGQGTKLEIKR

SEQ ID NO: 158 - protein, 128 aa, synthetic construct
  REGION 1..128: note = Description of Artificial Sequence: Synthetic polypeptide
QMQVVQSGAEVKKPGASVKVSCKASGYTFTGYYMHWVRQAPGQGLEWMGWINPNSGGTNYAQKFQGRVTMTRDTSISTAYMELSRLRSDDTAVYYCARGGDYVWGTYRPHYYYGMDVWGQGTTVTVSS

SEQ ID NO: 159 - protein, 121 aa, synthetic construct
  REGION 1..121: note = Description of Artificial Sequence: Synthetic polypeptide
QVQLVESGGGVVQPGRSLRLSCAASGFTFSNFGMHWVRQAPGKGLEWVAVIWYDGSNENYADSVKGRFTISRDNSKNTLYLHMNSLRVADTAVYYCARDGTIFGVVLGDYWGQGTLVTVSS

SEQ ID NO: 160 - protein, 121 aa, synthetic construct
  REGION 1..121: note = Description of Artificial Sequence: Synthetic polypeptide
QVQLVESGGGVVQPGRSLRLSCAASGFTFSYFGMHWVRQAPGKGLEWVAVIWYDGSNKYYADSVKGRFTISRDNSKNTLYLQMNSLRAEDTAVYYCARDGTIFGVLLGDYWGQGTLVTVSS

SEQ ID NO: 161 - protein, 120 aa, synthetic construct
  REGION 1..120: note = Description of Artificial Sequence: Synthetic polypeptide
QVQLVESGGGVVQPGRSLRLSCAASGFTFSSYGMHWVRQAPGKGLEWVAVIWYDGSNKYYADSVKGRFTISSDNSKNTLYLQMNSLRAEDTAVYYCARDRTIFGVVLDYWGQGTLVTVSS

SEQ ID NO: 162 - protein, 123 aa, synthetic construct
  REGION 1..123: note = Description of Artificial Sequence: Synthetic polypeptide
QVPLVQSGAEVKKPGASVKVSCKASGYTFTGYYIHWVRQAPGQGLEWMGWINPDSGGTDYSQRFQGRFTMTRDTSISTAYMELNRLRSDDTAVYYCAREATIFGMVIVPFDYWGQGTLVTVSS

SEQ ID NO: 163 - protein, 123 aa, synthetic construct
  REGION 1..123: note = Description of Artificial Sequence: Synthetic polypeptide
QVPLVQSGAEVKKPGASVKVSCKASGYTFTGYYIHWVRQAPGQGLEWMGWINPDSGGTDYSQRFQGRFTMTRDTSISTAYMELSRLRSDDTAVYYCAREATIFGMVIVPFDYWGQGTLVTVSS

SEQ ID NO: 164 - protein, 123 aa, synthetic construct
  REGION 1..123: note = Description of Artificial Sequence: Synthetic polypeptide
QVPLVQSGAEVKKPGASVKVSCKASGYTFTGYYIHWVRQAPGQGLVWMGWISPNSGDTSYAQKFQDRVTMTRDTSISTAYMELSRLRSDDTAVYFCTREATIFGMLIVPFDYWGQGTLVTVSS

SEQ ID NO: 165 - protein, 123 aa, synthetic construct
  REGION 1..123: note = Description of Artificial Sequence: Synthetic polypeptide
QVPLVQSGAEVKKPGASVKVSCKASGYTFTGYYIHWVRQAPGQGLEWMGWISPNNGDTNYAQKFQDRVTMTRDTSISTAYMELSRLRSDDTAVYYCTREATIFGMLIVPFDYWGQGTLVTVSS

SEQ ID NO: 166 - protein, 126 aa, synthetic construct
  REGION 1..126: note = Description of Artificial Sequence: Synthetic polypeptide
QVQLQESGPGLVKPSQTLSLTCTVSGDSISSGGYYWSWIRQHPGKGLEWIGYIYYSGSTYYNPSLKSRVTISVDTSKNQFSLKLSSVTAADTAVYYCARDRITIFGVVMGGGMDVWGQGTTVTVSS

SEQ ID NO: 167 - protein, 120 aa, synthetic construct
  REGION 1..120: note = Description of Artificial Sequence: Synthetic polypeptide
QVQLVESGGGVVQPGRSLRLSCAASGFTFSNYGMHWVRQAPGEGLEWVAAIWFDGSDKYYADSVKGRFTISRDNSKNTLYLQMNSLRAEDTAVYYCARDQAIFGVVPDYWGQGTLVTVSS

SEQ ID NO: 168 - protein, 121 aa, synthetic construct; identical to SEQ ID NO: 160
  REGION 1..121: note = Description of Artificial Sequence: Synthetic polypeptide

SEQ ID NO: 169 - protein, 120 aa, synthetic construct
  REGION 1..120: note = Description of Artificial Sequence: Synthetic polypeptide
QVQLVESGGGVVQPGRSLRLSCAASGFSFSSYGMHWVRQPPGKGLEWVAAIWYDGNNKYYADSVKGRFTISRDSSKNTLYLQMNSLRAEDTAVYYCARDRTIFGVVLEYLGQGTLVTVSS

SEQ ID NO: 170 - protein, 117 aa, synthetic construct
  REGION 1..117: note = Description of Artificial Sequence: Synthetic polypeptide
QVQLQESGPGLVKPSETLSLTCTVSQGSISSYYWSWIRQPAGKGLEWIGRIYTSGSTNYNPSLKSRVTMSIDTSKNQFSLKLNSVTAADTAVYYCARDVAVAGFDYWGQGTLVTVSS

SEQ ID NO: 171 - protein, 117 aa, synthetic construct
  REGION 1..117: note = Description of Artificial Sequence: Synthetic polypeptide
QVQLQESGPGLVKPSETLSLTCTVSGGSISSYYWSWIRQPAGKGLEWIGRIYTSGSTNYNPSLKSRVTMSIDTSKNQFSLKLNSVTAADTAVYYCARDVAVAGFDYWGQGTLVTVSS

SEQ ID NO: 172 - protein, 121 aa, synthetic construct
  REGION 1..121: note = Description of Artificial Sequence: Synthetic polypeptide
QVQLVESGGGVVQPGRSLRLSCAASGFTFSYFGMHWVRQAPGKGLEWVAVIWYDASNKYYADAVKGRFTISRDNSKNTLYLQMNSLRAEDTAVYYCARDGTIFGVLLGDYWGQGTLVTVSS

SEQ ID NO: 173 - protein, 121 aa, synthetic construct
  REGION 1..121: note = Description of Artificial Sequence: Synthetic polypeptide
QVQLVESGGGVVQPGRSLRLSCAASGFTFSYFGMHWVRQAPGKGLEWVAVIWYDASNKYYADSVKGRFTISRDNSKNTLYLQMNSLRAEDTAVYYCARDGTIFGVLLGDYWGQGTLVTVSS

SEQ ID NO: 174 - protein, 121 aa, synthetic construct
  REGION 1..121: note = Description of Artificial Sequence: Synthetic polypeptide
QVQLVESGGGVVQPGRSLRLSCAASGFTFSYFGMHWVRQAPGKGLEWVAVIWYDGSNKYYADAVKGRFTISRDNSKNTLYLQMNSLRAEDTAVYYCARDGTIFGVLLGDYWGQGTLVTVSS

SEQ ID NO: 175 - protein, 121 aa, synthetic construct; identical to SEQ ID NO: 172
  REGION 1..121: note = Description of Artificial Sequence: Synthetic polypeptide

SEQ ID NO: 176 - protein, 121 aa, synthetic construct; identical to SEQ ID NO: 172
  REGION 1..121: note = Description of Artificial Sequence: Synthetic polypeptide

SEQ ID NO: 177 - protein, 121 aa, synthetic construct
  REGION 1..121: note = Description of Artificial Sequence: Synthetic polypeptide
QVQLVESGGGVVQPGRSLRLSCAASGFTFSYFGMHWVRQAPGKGLEWVAVIWYDASNKYYADAVKGRFTISRDNSKNTLYLQMNSLRAEDTAVYYCARDRTIFGVLLGDYWGQGTLVTVSS

SEQ ID NO: 178 - protein, 121 aa, synthetic construct
  REGION 1..121: note = Description of Artificial Sequence: Synthetic polypeptide
QVQLVESGGGVVQPGRSLRLSCAASGFTFSNFGMHWVRQAPGKGLEWVAVIWYDASNENYADAVKGRFTISRDNSKNTLYLQMNSLRVADTAVYYCARDGTIFGVVLGDYWGQGTLVTVSS

SEQ ID NO: 179 - protein, 121 aa, synthetic construct; identical to SEQ ID NO: 178
  REGION 1..121: note = Description of Artificial Sequence: Synthetic polypeptide

SEQ ID NO: 180 - protein, 121 aa, synthetic construct; identical to SEQ ID NO: 178
  REGION 1..121: note = Description of Artificial Sequence: Synthetic polypeptide

SEQ ID NO: 181 - protein, 121 aa, synthetic construct
  REGION 1..121: note = Description of Artificial Sequence: Synthetic polypeptide
QVQLVESGGGVVQPGRSLRLSCAASGFTFSNFGMHWVRQAPGKGLEWVAVIWYDASNENYADSVKGRFTISRDNSKNTLYLHMNSLRVADTAVYYCARDGTIFGVVLGDYWGQGTLVTVSS

SEQ ID NO: 182 - protein, 121 aa, synthetic construct
  REGION 1..121: note = Description of Artificial Sequence: Synthetic polypeptide
QVQLVESGGGVVQPGRSLRLSCAASGFTFSNFGMHWVRQAPGKGLEWVAVIWYDGSNENYADAVKGRFTISRDNSKNTLYLHMNSLRVADTAVYYCARDGTIFGVVLGDYWGQGTLVTVSS

SEQ ID NO: 183 - protein, 121 aa, synthetic construct
  REGION 1..121: note = Description of Artificial Sequence: Synthetic polypeptide
QVQLVESGGGVVQPGRSLRLSCAASGFTFSNFGMHWVRQAPGKGLEWVAVIWYDASNENYADAVKGRFTISRDNSKNTLYLQMNSLRVEDTAVYYCARDRTIFGVVLGDYWGQGTLVTVSS

SEQ ID NO: 184 - protein, 121 aa, synthetic construct
  REGION 1..121: note = Description of Artificial Sequence: Synthetic polypeptide
QVQLVESGGGVVQPGRSLRLSCAASGFTFSNFGMHWVRQAPGKGLEWVAVIWYDASNENYADAVKGRFTISRDNSKNTLYLQMNSLRVEDTAVYYCARDGTIFGVVLGDYWGQGTLVTVSS

SEQ ID NO: 185 - protein, 121 aa, synthetic construct
  REGION 1..121: note = Description of Artificial Sequence: Synthetic polypeptide
QVQLVESGGGVVQPGRSLRLSCAASGFTFSNFGMHWVRQAPGKGLEWVAVIWYDGSNENYADSVKGRFTISRDNSKNTLYLHMNSLRAADTAVYYCARDGTIFGVVLGDYWGQGTLVTVSS

SEQ ID NO: 186 - protein, 121 aa, synthetic construct
  REGION 1..121: note = Description of Artificial Sequence: Synthetic polypeptide
QVQLVESGGGVVQPGRSLRLSCAASGFTFSNFGMHWVRQAPGKGLEWVAVIWYDASNENYADAVKGRFTISRDNSKNTLYLQMNSLRAADTAVYYCARDGTIFGVVLGDYWGQGTLVTVSS

SEQ ID NO: 187 - protein, 121 aa, synthetic construct
  REGION 1..121: note = Description of Artificial Sequence: Synthetic polypeptide
QVQLVESGGGVVQPGRSLRLSCAASGFTFSNFGMHWVRQAPGKGLEWVAVIWYDASNENYADAVKGRFTISRDNSKNTLYLHMNSLRAADTAVYYCARDGTIFGVVLGDYWGQGTLVTVSS

SEQ ID NO: 188 - protein, 121 aa, synthetic construct; identical to SEQ ID NO: 186
  REGION 1..121: note = Description of Artificial Sequence: Synthetic polypeptide

SEQ ID NO: 189 - protein, 121 aa, synthetic construct; identical to SEQ ID NO: 186
  REGION 1..121: note = Description of Artificial Sequence: Synthetic polypeptide

SEQ ID NO: 190 - protein, 121 aa, synthetic construct; identical to SEQ ID NO: 187
  REGION 1..121: note = Description of Artificial Sequence: Synthetic polypeptide

SEQ ID NO: 191 - protein, 121 aa, synthetic construct; identical to SEQ ID NO: 187
  REGION 1..121: note = Description of Artificial Sequence: Synthetic polypeptide

SEQ ID NO: 192 - protein, 121 aa, synthetic construct; identical to SEQ ID NO: 186
  REGION 1..121: note = Description of Artificial Sequence: Synthetic polypeptide

SEQ ID NO: 193 - protein, 121 aa, synthetic construct
  REGION 1..121: note = Description of Artificial Sequence: Synthetic polypeptide
QVQLVESGGGVVQPGRSLRLSCAASGFTFSNFGMHWVRQAPGKGLEWVAVIWYDGSNENYADAVKGRFTISRDNSKNTLYLQMNSLRAADTAVYYCARDGTIFGVVLGDYWGQGTLVTVSS

SEQ ID NO: 194 - protein, 121 aa, synthetic construct
  REGION 1..121: note = Description of Artificial Sequence: Synthetic polypeptide
QVQLVESGGGVVQPGRSLRLSCAASGFTFSNFGMHWVRQAPGKGLEWVAVIWYDASNENYADSVKGRFTISRDNSKNTLYLQMNSLRAADTAVYYCARDGTIFGVVLGDYWGQGTLVTVSS

SEQ ID NO: 195 - protein, 121 aa, synthetic construct
  REGION 1..121: note = Description of Artificial Sequence: Synthetic polypeptide
QVQLVESGGGVVQPGRSLRLSCAASGFTFSNFGMHWVRQAPGKGLEWVAVIWYDASNENYADAVKGRFTISRDNSKNTLYLQMNSLRAEDTAVYYCARDRTIFGVVLGDYWGQGTLVTVSS

SEQ ID NO: 196 - protein, 121 aa, synthetic construct
  REGION 1..121: note = Description of Artificial Sequence: Synthetic polypeptide
QVQLVESGGGVVQPGRSLRLSCAASGFTFSNFGMHWVRQAPGKGLEWVAVIWYDASNENYADAVKGRFTISRDNSKNTLYLQMNSLRAEDTAVYYCARDGTIFGVVLGDYWGQGTLVTVSS

SEQ ID NO: 197 - protein, 120 aa, synthetic construct
  REGION 1..120: note = Description of Artificial Sequence: Synthetic polypeptide
QVQLVESGGGVVQPGRSLRLSCAASGFTFSSYGMHWVRQAPGKGLEWVAVIWYDASNKYYADAVKGRFTISRDNSKNTLYLQMNSLRAEDTAVYYCARDRTIFGVVLDYWGQGTLVTVSS

SEQ ID NO: 198 - protein, 120 aa, synthetic construct
  REGION 1..120: note = Description of Artificial Sequence: Synthetic polypeptide
QVQLVESGGGVVQPGRSLRLSCAASGFTFSSYGMHWVRQAPGKGLEWVAVIWYDASNKYYADAVKGRFTISSDNSKNTLYLQMNSLRAEDTAVYYCARDRTIFGVVLDYWGQGTLVTVSS

SEQ ID NO: 199 - protein, 120 aa, synthetic construct; identical to SEQ ID NO: 197
  REGION 1..120: note = Description of Artificial Sequence: Synthetic polypeptide

SEQ ID NO: 200 - protein, 120 aa, synthetic construct; identical to SEQ ID NO: 197
  REGION 1..120: note = Description of Artificial Sequence: Synthetic polypeptide

SEQ ID NO: 201 - protein, 120 aa, synthetic construct; identical to SEQ ID NO: 198
  REGION 1..120: note = Description of Artificial Sequence: Synthetic polypeptide

SEQ ID NO: 202 - protein, 120 aa, synthetic construct; identical to SEQ ID NO: 198
  REGION 1..120: note = Description of Artificial Sequence: Synthetic polypeptide

SEQ ID NO: 203 - protein, 120 aa, synthetic construct; identical to SEQ ID NO: 197
  REGION 1..120: note = Description of Artificial Sequence: Synthetic polypeptide

SEQ ID NO: 204 - protein, 120 aa, synthetic construct
  REGION 1..120: note = Description of Artificial Sequence: Synthetic polypeptide
QVQLVESGGGVVQPGRSLRLSCAASGFTFSSYGMHWVRQAPGKGLEWVAVIWYDASNKYYADSVKGRFTISRDNSKNTLYLQMNSLRAEDTAVYYCARDRTIFGVVLDYWGQGTLVTVSS

SEQ ID NO: 205 - protein, 120 aa, synthetic construct
  REGION 1..120: note = Description of Artificial Sequence: Synthetic polypeptide
QVQLVESGGGVVQPGRSLRLSCAASGFTFSSYGMHWVRQAPGKGLEWVAVIWYDGSNKYYADAVKGRFTISRDNSKNTLYLQMNSLRAEDTAVYYCARDRTIFGVVLDYWGQGTLVTVSS

SEQ ID NO: 206 - protein, 121 aa, synthetic construct; identical to SEQ ID NO: 172
  REGION 1..121: note = Description of Artificial Sequence: Synthetic polypeptide

SEQ ID NO: 207 - protein, 121 aa, synthetic construct; identical to SEQ ID NO: 177
  REGION 1..121: note = Description of Artificial Sequence: Synthetic polypeptide

SEQ ID NO: 208 - protein, 121 aa, synthetic construct; identical to SEQ ID NO: 172
  REGION 1..121: note = Description of Artificial Sequence: Synthetic polypeptide

SEQ ID NO: 209 - protein, 121 aa, synthetic construct; identical to SEQ ID NO: 177
  REGION 1..121: note = Description of Artificial Sequence: Synthetic polypeptide

SEQ ID NO: 210 - protein, 121 aa, synthetic construct; identical to SEQ ID NO: 160
  REGION 1..121: note = Description of Artificial Sequence: Synthetic polypeptide

SEQ ID NO: 211 - protein, 121 aa, synthetic construct; identical to SEQ ID NO: 173
  REGION 1..121: note = Description of Artificial Sequence: Synthetic polypeptide

SEQ ID NO: 212 - protein, 121 aa, synthetic construct; identical to SEQ ID NO: 174
  REGION 1..121: note = Description of Artificial Sequence: Synthetic polypeptide

SEQ ID NO: 213 - protein, 120 aa, synthetic construct
  REGION 1..120: note = Description of Artificial Sequence: Synthetic polypeptide
QVQLVESGGGVVQPGRSLRLSCAASGFSFSSYGMHWVRQPPGKGLEWVAAIWYDANNKYYADAVKGRFTISRDSSKNTLYLQMNSLRAEDTAVYYCARDRTIFGVVLEYWGQGTLVTVSS

SEQ ID NO: 214 - protein, 120 aa, synthetic construct; identical to SEQ ID NO: 213
  REGION 1..120: note = Description of Artificial Sequence: Synthetic polypeptide

SEQ ID NO: 215 - protein, 120 aa, synthetic construct
  REGION 1..120: note = Description of Artificial Sequence: Synthetic polypeptide
QVQLVESGGGVVQPGRSLRLSCAASGFSFSSYGMHWVRQPPGKGLEWVAAIWYDANNKYYADAVKGRFTISRDSSKNTLYLQMNSLRAEDTAVYYCARDRTIFGVVLEYLGQGTLVTVSS

SEQ ID NO: 216 - protein, 120 aa, synthetic construct; identical to SEQ ID NO: 213
  REGION 1..120: note = Description of Artificial Sequence: Synthetic polypeptide

SEQ ID NO: 217 - protein, 120 aa, synthetic construct; identical to SEQ ID NO: 215
  REGION 1..120: note = Description of Artificial Sequence: Synthetic polypeptide

SEQ ID NO: 218 - protein, 120 aa, synthetic construct; identical to SEQ ID NO: 215
  REGION 1..120: note = Description of Artificial Sequence: Synthetic polypeptide

SEQ ID NO: 219 - protein, 120 aa, synthetic construct; identical to SEQ ID NO: 213
  REGION 1..120: note = Description of Artificial Sequence: Synthetic polypeptide

SEQ ID NO: 220 - protein, 120 aa, synthetic construct
  REGION 1..120: note = Description of Artificial Sequence: Synthetic polypeptide
QVQLVESGGGVVQPGRSLRLSCAASGFSFSSYGMHWVRQPPGKGLEWVAAIWYDGNNKYYADAVKGRFTISRDSSKNTLYLQMNSLRAEDTAVYYCARDRTIFGVVLEYWGQGTLVTVSS

SEQ ID NO: 221 - protein, 120 aa, synthetic construct
  REGION 1..120: note = Description of Artificial Sequence: Synthetic polypeptide
QVQLVESGGGVVQPGRSLRLSCAASGFSFSSYGMHWVRQPPGKGLEWVAAIWYDANNKYYADSVKGRFTISRDSSKNTLYLQMNSLRAEDTAVYYCARDRTIFGVVLEYWGQGTLVTVSS

SEQ ID NO: 222 - protein, 120 aa, synthetic construct; identical to SEQ ID NO: 213
  REGION 1..120: note = Description of Artificial Sequence: Synthetic polypeptide

SEQ ID NO: 223 - protein, 120 aa, synthetic construct; identical to SEQ ID NO: 215
  REGION 1..120: note = Description of Artificial Sequence: Synthetic polypeptide

SEQ ID NO: 224 - protein, 120 aa, synthetic construct
  REGION 1..120: note = Description of Artificial Sequence: Synthetic polypeptide
QVQLVESGGGVVQPGRSLRLSCAASGFSFSSYGMHWVRQAPGKGLEWVAVIWYDASNKYYEDAVKGRFTISRDNSKNTLFLQVNSLRAEDTAVYYCARGITIFGHGFEYWGQGTLVTVSS

SEQ ID NO: 225 - protein, 120 aa, synthetic construct
  REGION 1..120: note = Description of Artificial Sequence: Synthetic polypeptide
QVQLVESGGGVVQPGRSLRLSCAASGFSFSSYGMHWVRQAPGKGLEWVAVIWYDGSNKYYEDSVKGRFTISRDNSKNTLFLQVNSLRAEDTAVYYCARGITIFGHGFEYWGQGTLVTVSS

SEQ ID NO: 226 - protein, 120 aa, synthetic construct
  REGION 1..120: note = Description of Artificial Sequence: Synthetic polypeptide
QVQLVESGGGVVQPGRSLRLSCAASGFSFSSYGMHWVRQAPGKGLEWVAVIWYDGSNKYYEDAVKGRFTISRDNSKNTLFLQVNSLRAEDTAVYYCARGITIFGHGFEYWGQGTLVTVSS

SEQ ID NO: 227 - protein, 120 aa, synthetic construct
  REGION 1..120: note = Description of Artificial Sequence: Synthetic polypeptide
QVQLVESGGGVVQPGRSLRLSCAASGFSFSSYGMHWVRQAPGKGLEWVAVIWYDASNKYYEDSVKGRFTISRDNSKNTLFLQVNSLRAEDTAVYYCARGITIFGHGFEYWGQGTLVTVSS

SEQ ID NO: 228 - protein, 120 aa, synthetic construct
  REGION 1..120: note = Description of Artificial Sequence: Synthetic polypeptide
QVQLVESGGGVVQPGRSLRLSCAASGFTFSNYGMHWVRQAPGEGLEWVAAIWFDASDKYYADAVKGRFTISRDNSKNTLYLQMNSLRAEDTAVYYCARDQAIFGVVPDYWGQGTLVTVSS

SEQ ID NO: 229 - protein, 120 aa, synthetic construct
  REGION 1..120: note = Description of Artificial Sequence: Synthetic polypeptide
QVQLVESGGGVVQPGRSLRLSCAASGFTFSNYGMHWVRQAPGEGLEWVAAIWFDASDKYYADSVKGRFTISRDNSKNTLYLQMNSLRAEDTAVYYCARDQAIFGVVPDYWGQGTLVTVSS

SEQ ID NO: 230 - protein, 120 aa, synthetic construct
  REGION 1..120: note = Description of Artificial Sequence: Synthetic polypeptide
QVQLVESGGGVVQPGRSLRLSCAASGFTFSNYGMHWVRQAPGEGLEWVAAIWFDGSDKYYADAVKGRFTISRDNSKNTLYLQMNSLRAEDTAVYYCARDQAIFGVVPDYWGQGTLVTVSS

SEQ ID NO: 231 - protein, 120 aa, synthetic construct; identical to SEQ ID NO: 228
  REGION 1..120: note = Description of Artificial Sequence: Synthetic polypeptide

SEQ ID NO: 232 - protein, 120 aa, synthetic construct
  REGION 1..120: note = Description of Artificial Sequence: Synthetic polypeptide
QVQLVESGGGVVQPGRSLRLSCAASGFTFSNYGMHWVRQAPGKGLEWVAAIWFDASDKYYADAVKGRFTISRDNSKNTLYLQMNSLRAEDTAVYYCARDQAIFGVVPDYWGQGTLVTVSS

SEQ ID NO: 233 - protein, 120 aa, synthetic construct; identical to SEQ ID NO: 232
  REGION 1..120: note = Description of Artificial Sequence: Synthetic polypeptide

SEQ ID NO: 234 - protein, 120 aa, synthetic construct; identical to SEQ ID NO: 228
  REGION 1..120: note = Description of Artificial Sequence: Synthetic polypeptide

SEQ ID NO: 235 - protein, 120 aa, synthetic construct; identical to SEQ ID NO: 232
  REGION 1..120: note = Description of Artificial Sequence: Synthetic polypeptide

SEQ ID NO: 236 - protein, 126 aa, synthetic construct
  REGION 1..126: note = Description of Artificial Sequence: Synthetic polypeptide
QVQLQESGPGLVKPSETLSLTCTVSGDSISSGGYYWSWIRQPPGKGLEWIGYIYYSGSTYYNPSLKSRVTISVDTSKNQFSLKLSSVTAADTAVYYCARDRITIFGVVMGGGMDVWGQGTTVTVSS

SEQ ID NO: 237 - protein, 126 aa, synthetic construct; identical to SEQ ID NO: 236
  REGION 1..126: note = Description of Artificial Sequence: Synthetic polypeptide

SEQ ID NO: 238 - protein, 126 aa, synthetic construct
  REGION 1..126: note = Description of Artificial Sequence: Synthetic polypeptide
QVQLQESGPGLVKPSQTLSLTCTVSGDSISSGGYYWSWIRQPPGKGLEWIGYIYYSGSTYYNPSLKSRVTISVDTSKNQFSLKLSSVTAADTAVYYCARDRITIFGVVMGGGMDVWGQGTTVTVSS

SEQ ID NO: 239 - protein, 126 aa, synthetic construct
  REGION 1..126: note = Description of Artificial Sequence: Synthetic polypeptide
QVQLQESGPGLVKPSETLSLTCTVSGDSISSGGYYWSWIRQHPGKGLEWIGYIYYSGSTYYNPSLKSRVTISVDTSKNQFSLKLSSVTAADTAVYYCARDRITIFGVVMGGGMDVWGQGTTVTVSS

SEQ ID NO: 240 - protein, 126 aa, synthetic construct; identical to SEQ ID NO: 166
  REGION 1..126: note = Description of Artificial Sequence: Synthetic polypeptide

SEQ ID NO: 241 - protein, 126 aa, synthetic construct; identical to SEQ ID NO: 239
  REGION 1..126: note = Description of Artificial Sequence: Synthetic polypeptide

SEQ ID NO: 242 - protein, 126 aa, synthetic construct; identical to SEQ ID NO: 238
  REGION 1..126: note = Description of Artificial Sequence: Synthetic polypeptide

SEQ ID NO: 243 - protein, 123 aa, synthetic construct
  REGION 1..123: note = Description of Artificial Sequence: Synthetic polypeptide
QVQLVQSGAEVKKPGASVKVSCKASGYTFTGYYIHWVRQAPGQGLEWMGWINPESGGTDYSQRFQGRVTMTRDTSISTAYMELNRLRSDDTAVYYCAREATIFGMVIVPFDYWGQGTLVTVSS

SEQ ID NO: 244 - protein, 123 aa, synthetic construct
  REGION 1..123: note = Description of Artificial Sequence: Synthetic polypeptide
QVPLVQSGAEVKKPGASVKVSCKASGYTFTGYYIHWVRQAPGQGLEWMGWINPESGGTDYSQRFQGRFTMTRDTSISTAYMELNRLRSDDTAVYYCAREATIFGMVIVPFDYWGQGTLVTVSS

SEQ ID NO: 245 - protein, 123 aa, synthetic construct
  REGION 1..123: note = Description of Artificial Sequence: Synthetic polypeptide
QVQLVQSGAEVKKPGASVKVSCKASGYTFTGYYIHWVRQAPGQGLEWMGWINPDAGGTDYSQRFQGRVTMTRDTSISTAYMELNRLRSDDTAVYYCAREATIFGMVIVPFDYWGQGTLVTVSS

SEQ ID NO: 246 - protein, 123 aa, synthetic construct
  REGION 1..123: note = Description of Artificial Sequence: Synthetic polypeptide
QVPLVQSGAEVKKPGASVKVSCKASGYTFTGYYIHWVRQAPGQGLEWMGWINPDAGGTDYSQRFQGRFTMTRDTSISTAYMELNRLRSDDTAVYYCAREATIFGMVIVPFDYWGQGTLVTVSS

SEQ ID NO: 247 - protein, 123 aa, synthetic construct
  REGION 1..123: note = Description of Artificial Sequence: Synthetic polypeptide
QVQLVQSGAEVKKPGASVKVSCKASGYTFTGYYIHWVRQAPGQGLEWMGWINPDSGGTDYSQRFQGRVTMTRDTSISTAYMELNRLRSDDTAVYYCAREATIFGMVIVPFDYWGQGTLVTVSS

SEQ ID NO: 248 - protein, 123 aa, synthetic construct
  REGION 1..123: note = Description of Artificial Sequence: Synthetic polypeptide
QVQLVQSGAEVKKPGASVKVSCKASGYTFTGYYIHWVRQAPGQGLEWMGWINPDSGGTDYSQRFQGRFTMTRDTSISTAYMELNRLRSDDTAVYYCAREATIFGMVIVPFDYWGQGTLVTVSS

SEQ ID NO: 249 - protein, 123 aa, synthetic construct
  REGION 1..123: note = Description of Artificial Sequence: Synthetic polypeptide
QVPLVQSGAEVKKPGASVKVSCKASGYTFTGYYIHWVRQAPGQGLEWMGWINPDSGGTDYSQRFQGRVTMTRDTSISTAYMELNRLRSDDTAVYYCAREATIFGMVIVPFDYWGQGTLVTVSS

SEQ ID NO: 250 - protein, 123 aa, synthetic construct
  REGION 1..123: note = Description of Artificial Sequence: Synthetic polypeptide
QVQLVQSGAEVKKPGASVKVSCKASGYTFTGYYIHWVRQAPGQGLEWMGWINPDAGGTDYSQRFQGRFTMTRDTSISTAYMELNRLRSDDTAVYYCAREATIFGMVIVPFDYWGQGTLVTVSS

SEQ ID NO: 251 - protein, 123 aa, synthetic construct
  REGION 1..123: note = Description of Artificial Sequence: Synthetic polypeptide
QVPLVQSGAEVKKPGASVKVSCKASGYTFTGYYIHWVRQAPGQGLEWMGWINPDAGGTDYSQRFQGRVTMTRDTSISTAYMELNRLRSDDTAVYYCAREATIFGMVIVPFDYWGQGTLVTVSS

SEQ ID NO: 252 - protein, 123 aa, synthetic construct
  REGION 1..123: note = Description of Artificial Sequence: Synthetic polypeptide
QVQLVQSGAEVKKPGASVKVSCKASGYTFTGYYIHWVRQAPGQGLEWMGWINPDAGGTDYSQRFQGRVTMTRDTSISTAYMELNSLRSDDTAVYYCAREATIFGMVIVPFDYWGQGTLVTVSS

SEQ ID NO: 253 - protein, 123 aa, synthetic construct
  REGION 1..123: note = Description of Artificial Sequence: Synthetic polypeptide
QVQLVQSGAEVKKPGASVKVSCKASGYTFTGYYIHWVRQAPGQGLEWMGWINPESGGTDYSQRFQGRVTMTRDTSISTAYMELNSLRSDDTAVYYCAREATIFGMVIVPFDYWGQGTLVTVSS

SEQ ID NO: 254 - protein, 123 aa, synthetic construct
  REGION 1..123: note = Description of Artificial Sequence: Synthetic polypeptide
QVPLVQSGAEVKKPGASVKVSCKASGYTFTGYYIHWVRQAPGQGLVWMGWISPNSGETSYAQKFQDRVTMTRDTSISTAYMELSRLRSDDTAVYFCAREATIFGMLIVPFDYWGQGTLVTVSS

SEQ ID NO: 255 - protein, 123 aa, synthetic construct
  REGION 1..123: note = Description of Artificial Sequence: Synthetic polypeptide
QVPLVQSGAEVKKPGASVKVSCKASGYTFTGYYIHWVRQAPGQGLVWMGWISPNSGDTSYAQKFQDRVTMTRDTSISTAYMELSRLRSDDTAVYFCAREATIFGMLIVPFDYWGQGTLVTVSS

SEQ ID NO: 256 - protein, 123 aa, synthetic construct; identical to SEQ ID NO: 254
  REGION 1..123: note = Description of Artificial Sequence: Synthetic polypeptide

SEQ ID NO: 257 - protein, 123 aa, synthetic construct
  REGION 1..123: note = Description of Artificial Sequence: Synthetic polypeptide
QVPLVQSGAEVKKPGASVKVSCKASGYTFTGYYIHWVRQAPGQGLVWMGWISPNSGETSYAQKFQDRVTMTRDTSISTAYMELSRLRSDDTAVYFCTREATIFGMLIVPFDYWGQGTLVTVSS

SEQ ID NO: 258 - protein, 123 aa, synthetic construct; identical to SEQ ID NO: 164
  REGION 1..123: note = Description of Artificial Sequence: Synthetic polypeptide

SEQ ID NO: 259 - protein, 123 aa, synthetic construct; identical to SEQ ID NO: 257
  REGION 1..123: note = Description of Artificial Sequence: Synthetic polypeptide

SEQ ID NO: 260 - protein, 123 aa, synthetic construct; identical to SEQ ID NO: 255
  REGION 1..123: note = Description of Artificial Sequence: Synthetic polypeptide

SEQ ID NO: 261 - protein, 123 aa, synthetic construct
  REGION 1..123: note = Description of Artificial Sequence: Synthetic polypeptide
QVQLVQSGAEVKKPGASVKVSCKASGYTFTGYYIHWVRQAPGQGLEWMGWISPNSGETSYAQKFQDRVTMTRDTSISTAYMELSSLRSDDTAVYFCAREATIFGMLIVPFDYWGQGTLVTVSS

SEQ ID NO: 262 - protein, 123 aa, synthetic construct
  REGION 1..123: note = Description of Artificial Sequence: Synthetic polypeptide
QVQLVQSGAEVKKPGASVKVSCKASGYTFTGYYIHWVRQAPGQGLEWMGWISPNSGETSYAQKFQDRVTMTRDTSISTAYMELSRLRSDDTAVYFCAREATIFGMLIVPFDYWGQGTLVTVSS

SEQ ID NO: 263 - protein, 123 aa, synthetic construct
  REGION 1..123: note = Description of Artificial Sequence: Synthetic polypeptide
QVPLVQSGAEVKKPGASVKVSCKASGYTFTGYYIHWVRQAPGQGLEWMGWINPESGGTDYSQRFQGRVTMTRDTSISTAYMELSRLRSDDTAVYYCAREATIFGMVIVPFDYWGQGTLVTVSS

SEQ ID NO: 264 - protein, 123 aa, synthetic construct
  REGION 1..123: note = Description of Artificial Sequence: Synthetic polypeptide
QVPLVQSGAEVKKPGASVKVSCKASGYTFTGYYIHWVRQAPGQGLEWMGWINPESGGTDYSQRFQGRFTMTRDTSISTAYMELSRLRSDDTAVYYCAREATIFGMVIVPFDYWGQGTLVTVSS

SEQ ID NO: 265 - protein, 123 aa, synthetic construct
  REGION 1..123: note = Description of Artificial Sequence: Synthetic polypeptide
QVPLVQSGAEVKKPGASVKVSCKASGYTFTGYYIHWVRQAPGQGLEWMGWINPDSGGTDYSQRFQGRVTMTRDTSISTAYMELSRLRSDDTAVYYCAREATIFGMVIVPFDYWGQGTLVTVSS

SEQ ID NO: 266 - protein, 123 aa, synthetic construct
  REGION 1..123: note = Description of Artificial Sequence: Synthetic polypeptide
QVQLVQSGAEVKKPGASVKVSCKASGYTFTGYYIHWVRQAPGQGLEWMGWINPESGGTDYSQRFQGRVTMTRDTSISTAYMELSSLRSDDTAVYYCAREATIFGMVIVPFDYWGQGTLVTVSS

SEQ ID NO: 267 - protein, 123 aa, synthetic construct; identical to SEQ ID NO: 263
  REGION 1..123: note = Description of Artificial Sequence: Synthetic polypeptide

SEQ ID NO: 268 - protein, 123 aa, synthetic construct
  REGION 1..123: note = Description of Artificial Sequence: Synthetic polypeptide
QVPLVQSGAEVKKPGASVKVSCKASGYTFTGYYIHWVRQAPGQGLEWMGWISPNQGETNYAQKFQDRVTMTRDTSISTAYMELSRLRSDDTAVYYCAREATIFGMLIVPFDYWGQGTLVTVSS

SEQ ID NO: 269 - protein, 123 aa, synthetic construct
  REGION 1..123: note = Description of Artificial Sequence: Synthetic polypeptide
QVPLVQSGAEVKKPGASVKVSCKASGYTFTGYYIHWVRQAPGQGLEWMGWISPNQGDTNYAQKFQDRVTMTRDTSISTAYMELSRLRSDDTAVYYCAREATIFGMLIVPFDYWGQGTLVTVSS

SEQ ID NO: 270 - protein, 123 aa, synthetic construct
  REGION 1..123: note = Description of Artificial Sequence: Synthetic polypeptide
QVPLVQSGAEVKKPGASVKVSCKASGYTFTGYYIHWVRQAPGQGLEWMGWISPNQGETNYAQKFQDRVTMTRDTSISTAYMELSRLRSDDTAVYYCTREATIFGMLIVPFDYWGQGTLVTVSS

SEQ ID NO: 271 - protein, 123 aa, synthetic construct
  REGION 1..123: note = Description of Artificial Sequence: Synthetic polypeptide
QVPLVQSGAEVKKPGASVKVSCKASGYTFTGYYIHWVRQAPGQGLEWMGWISPNNGETNYAQKFQDRVTMTRDTSISTAYMELSRLRSDDTAVYYCAREATIFGMLIVPFDYWGQGTLVTVSS

SEQ ID NO: 272 - protein, 123 aa, synthetic construct
  REGION 1..123: note = Description of Artificial Sequence: Synthetic polypeptide
QVPLVQSGAEVKKPGASVKVSCKASGYTFTGYYIHWVRQAPGQGLEWMGWISPNNGDTNYAQKFQDRVTMTRDTSISTAYMELSRLRSDDTAVYYCAREATIFGMLIVPFDYWGQGTLVTVSS

SEQ ID NO: 273 - protein, 123 aa, synthetic construct
  REGION 1..123: note = Description of Artificial Sequence: Synthetic polypeptide
QVPLVQSGAEVKKPGASVKVSCKASGYTFTGYYIHWVRQAPGQGLEWMGWISPNQGDTNYAQKFQDRVTMTRDTSISTAYMELSRLRSDDTAVYYCTREATIFGMLIVPFDYWGQGTLVTVSS

SEQ ID NO: 274 - protein, 123 aa, synthetic construct
  REGION 1..123: note = Description of Artificial Sequence: Synthetic polypeptide
QVPLVQSGAEVKKPGASVKVSCKASGYTFTGYYIHWVRQAPGQGLEWMGWISPNNGETNYAQKFQDRVTMTRDTSISTAYMELSRLRSDDTAVYYCTREATIFGMLIVPFDYWGQGTLVTVSS

SEQ ID NO: 275 - protein, 123 aa, synthetic construct; identical to SEQ ID NO: 268
  REGION 1..123: note = Description of Artificial Sequence: Synthetic polypeptide

SEQ ID NO: 276 - protein, 123 aa, synthetic construct; identical to SEQ ID NO: 272
  REGION 1..123: note = Description of Artificial Sequence: Synthetic polypeptide

SEQ ID NO: 277 - protein, 123 aa, synthetic construct; identical to SEQ ID NO: 269
  REGION 1..123: note = Description of Artificial Sequence: Synthetic polypeptide

SEQ ID NO: 278 - protein, 123 aa, synthetic construct; identical to SEQ ID NO: 271
  REGION 1..123: note = Description of Artificial Sequence: Synthetic polypeptide

SEQ ID NO: 279 - protein, 123 aa, synthetic construct
  REGION 1..123: note = Description of Artificial Sequence: Synthetic polypeptide
QVQLVQSGAEVKKPGASVKVSCKASGYTFTGYYIHWVRQAPGQGLEWMGWISPNQGETNYAQKFQDRVTMTRDTSISTAYMELSSLRSDDTAVYYCAREATIFGMLIVPFDYWGQGTLVTVSS

SEQ ID NO: 280 - protein, 123 aa, synthetic construct; identical to SEQ ID NO: 279
  REGION 1..123: note = Description of Artificial Sequence: Synthetic polypeptide

SEQ ID NO: 281 - protein, 128 aa, synthetic construct; identical to SEQ ID NO: 158
  REGION 1..128: note = Description of Artificial Sequence: Synthetic polypeptide

SEQ ID NO: 282 - protein, 128 aa, synthetic construct; identical to SEQ ID NO: 158
  REGION 1..128: note = Description of Artificial Sequence: Synthetic polypeptide

SEQ ID NO: 283 - protein, 128 aa, synthetic construct; identical to SEQ ID NO: 158
  REGION 1..128: note = Description of Artificial Sequence: Synthetic polypeptide

SEQ ID NO: 284 - protein, 128 aa, synthetic construct; identical to SEQ ID NO: 158
  REGION 1..128: note = Description of Artificial Sequence: Synthetic polypeptide

SEQ ID NO: 285 - protein, 128 aa, synthetic construct; identical to SEQ ID NO: 158
  REGION 1..128: note = Description of Artificial Sequence: Synthetic polypeptide

SEQ ID NO: 286 - protein, 128 aa, synthetic construct; identical to SEQ ID NO: 158
  REGION 1..128: note = Description of Artificial Sequence: Synthetic polypeptide

SEQ ID NO: 287 - protein, 128 aa, synthetic construct; identical to SEQ ID NO: 158
  REGION 1..128: note = Description of Artificial Sequence: Synthetic polypeptide

SEQ ID NO: 288 - protein, 128 aa, synthetic construct; identical to SEQ ID NO: 158
  REGION 1..128: note = Description of Artificial Sequence: Synthetic polypeptide

SEQ ID NO: 289 - protein, 128 aa, synthetic construct; identical to SEQ ID NO: 158
  REGION 1..128: note = Description of Artificial Sequence: Synthetic polypeptide

SEQ ID NO: 290 - protein, 128 aa, synthetic construct; identical to SEQ ID NO: 158
  REGION 1..128: note = Description of Artificial Sequence: Synthetic polypeptide

SEQ ID NO: 291 - protein, 128 aa, synthetic construct; identical to SEQ ID NO: 158
  REGION 1..128: note = Description of Artificial Sequence: Synthetic polypeptide

SEQ ID NO: 292 - protein, 128 aa, synthetic construct; identical to SEQ ID NO: 158
  REGION 1..128: note = Description of Artificial Sequence: Synthetic polypeptide

SEQ ID NO: 293 - protein, 128 aa, synthetic construct
  REGION 1..128: note = Description of Artificial Sequence: Synthetic polypeptide
QMQVVQSGAEVKKPGASVKVSCKASGYTFTGYYMHWVRQAPGQGLEWMGWINPNSGGTNYAQKFQGRVTMTRDTSISTAYMELSSLRSDDTAVYYCARGGDYVFGTYRPHYYYGMDVWGQGTTVTVSS

SEQ ID NO: 294 - protein, 128 aa, synthetic construct
  REGION 1..128: note = Description of Artificial Sequence: Synthetic polypeptide
QMQVVQSGAEVKKPGASVKVSCKASGYTFTGYYMHWVRQAPGQGLEWMGWINPNSGGTNYAQKFQGRVTMTRDTSISTAYMELSRLRSDDTAVYYCARGGDYVFGTYRPHYYYGMDVWGQGTTVTVSS

SEQ ID NO: 295 - protein, 121 aa, synthetic construct; identical to SEQ ID NO: 195
  REGION 1..121: note = Description of Artificial Sequence: Synthetic polypeptide

SEQ ID NO: 296 - protein, 121 aa, synthetic construct; identical to SEQ ID NO: 177
  REGION 1..121: note = Description of Artificial Sequence: Synthetic polypeptide

SEQ ID NO: 297 - protein, 128 aa, synthetic construct; identical to SEQ ID NO: 158
  REGION 1..128: note = Description of Artificial Sequence: Synthetic polypeptide

SEQ ID NO: 298 - protein, 121 aa, synthetic construct
  REGION 1..121: note = Description of Artificial Sequence: Synthetic polypeptide
QVQLVESGGGVVQPGRSLRLSCTASGFTFSSYGIHWVRQAPGKGLEWVAVIWYDGSNKFHADSVKGRFTISRDNSKNTLYLQMNSLRAEDSAMYFCARGKVAGMPEAFEIWGQGTKVTVSS

SEQ ID NO: 299 - protein, 129 aa, synthetic construct
  REGION 1..129: note = Description of Artificial Sequence: Synthetic polypeptide
QMQLVQSGAEVKKPGASVKVSCKASGYTFTSYDINWVRQATGQGLEWMGWMNPNSGNTGYAQKFQGRVTMTRDTSISTAYMELSSLRSQDTAVYYCARGGDYVWGSYRPYYYYYGMDVWGQGTTVTVSS

SEQ ID NO: 300 - protein, 121 aa, synthetic construct
  REGION 1..121: note = Description of Artificial Sequence: Synthetic polypeptide
QVQLVESGGGVVQPGRSLRLSCAASGFTFSSYGIHWVRQAPGKGLEWVAVIWYDASNKFHADAVKGRFTISRDNSKNTLYLQMNSLRAEDSAMYFCARGKVAGMPEAFEIWGQGTKVTVSS

SEQ ID NO: 301 - protein, 121 aa, synthetic construct
  REGION 1..121: note = Description of Artificial Sequence: Synthetic polypeptide
QVQLVESGGGVVQPGRSLRLSCTASGFTFSSYGIHWVRQAPGKGLEWVAVIWYDASNKFHADAVKGRFTISRDNSKNTLYLQMNSLRAEDSAMYFCARGKVAGMPEAFEIWGQGTKVTVSS

SEQ ID NO: 302 - protein, 121 aa, synthetic construct; identical to SEQ ID NO: 300
  REGION 1..121: note = Description of Artificial Sequence: Synthetic polypeptide

SEQ ID NO: 303 - protein, 121 aa, synthetic construct
  REGION 1..121: note = Description of Artificial Sequence: Synthetic polypeptide
QVQLVESGGGVVQPGRSLRLSCAASGFTFSSYGIHWVRQAPGKGLEWVAVIWYDASNKFHADAVKGRFTISRDNSKNTLYLQMNSLRAEDSAMYFCARGKVAGMPEAFEIWGQGTLVTVSS

SEQ ID NO: 304 - protein, 121 aa, synthetic construct
  REGION 1..121: note = Description of Artificial Sequence: Synthetic polypeptide
QVQLVESGGGVVQPGRSLRLSCAASGFTFSSYGIHWVRQAPGKGLEWVAVIWYDASNKFHADSVKGRFTISRDNSKNTLYLQMNSLRAEDSAMYFCARGKVAGMPEAFEIWGQGTKVTVSS

SEQ ID NO: 305 - protein, 121 aa, synthetic construct
  REGION 1..121: note = Description of Artificial Sequence: Synthetic polypeptide
QVQLVESGGGVVQPGRSLRLSCAASGFTFSSYGIHWVRQAPGKGLEWVAVIWYDGSNKFHADAVKGRFTISRDNSKNTLYLQMNSLRAEDSAMYFCARGKVAGMPEAFEIWGQGTKVTVSS

SEQ ID NO: 306 - protein, 129 aa, synthetic construct
  REGION 1..129: note = Description of Artificial Sequence: Synthetic polypeptide
QMQLVQSGAEVKKPGASVKVSCKASGYTFTSYDINWVRQATGQGLEWMGWMNPNSGGTGYAQKFQGRVTMTRDTSISTAYMELSSLRSQDTAVYYCARGGDYVWGSYRPYYYYYGMDVWGQGTTVTVSS

SEQ ID NO: 307 - protein, 129 aa, synthetic construct; identical to SEQ ID NO: 299
  REGION 1..129: note = Description of Artificial Sequence: Synthetic polypeptide

SEQ ID NO: 308 - protein, 129 aa, synthetic construct; identical to SEQ ID NO: 306
  REGION 1..129: note = Description of Artificial Sequence: Synthetic polypeptide

SEQ ID NO: 309 - protein, 129 aa, synthetic construct
  REGION 1..129: note = Description of Artificial Sequence: Synthetic polypeptide
QMQLVQSGAEVKKPGASVKVSCKASGYTFTSYDINWVRQAPGQGLEWMGWMNPNSGGTGYAQKFQGRVTMTRDTSISTAYMELSSLRSDDTAVYYCARGGDYVWGSYRPYYYYYGMDVWGQGTTVTVSS

SEQ ID NO: 310 - protein, 129 aa, synthetic construct; identical to SEQ ID NO: 306
  REGION 1..129: note = Description of Artificial Sequence: Synthetic polypeptide

SEQ ID NO: 311 - protein, 129 aa, synthetic construct
  REGION 1..129: note = Description of Artificial Sequence: Synthetic polypeptide
QMQLVQSGAEVKKPGASVKVSCKASGYTFTSYDINWVRQAPGQGLEWMGWMNPNSGNTGYAQKFQGRVTMTRDTSISTAYMELSSLRSDDTAVYYCARGGDYVWGSYRPYYYYYGMDVWGQGTTVTVSS

SEQ ID NO: 312 - protein, 129 aa, synthetic construct
  REGION 1..129: note = Description of Artificial Sequence: Synthetic polypeptide
QMQLVQSGAEVKKPGASVKVSCKASGYTFTSYDINWVRQATGQGLEWMGWMNPNSGGTGYAQKFQGRVTMTRDTSISTAYMELSSLRSQDTAVYYCARGGDYVFGSYRPYYYYYGMDVWGQGTTVTVSS

SEQ ID NO: 313 - protein, 129 aa, synthetic construct
  REGION 1..129: note = Description of Artificial Sequence: Synthetic polypeptide
QMQLVQSGAEVKKPGASVKVSCKASGYTFTSYDINWVRQAPGQGLEWMGWMNPNSGGTGYAQKFQGRVTMTRDTSISTAYMELSSLRSDDTAVYYCARGGDYVFGSYRPYYYYYGMDVWGQGTTVTVSS

SEQ ID NO: 314 - protein, 121 aa, synthetic construct; identical to SEQ ID NO: 303
  REGION 1..121: note = Description of Artificial Sequence: Synthetic polypeptide

SEQ ID NO: 315 - protein, 216 aa, synthetic construct
  REGION 1..216: note = Description of Artificial Sequence: Synthetic polypeptide
QSVLTQPPSASGTPGQRVTISCSGSSSNIGSNTVNWYQHLPGTAPKLLIYTNNQRPSGVPDRFSGSKSGTSASLAISGLQSEDEADYFCATFDDSLNGPVFGGGTKLTVLGQPKAAPSVTLFPPSSEELQANKATLVCLISDFYPGAVTVAWKADSSPVKAGVETTTPSKQSNNKYAASSYLSLTPEQWKSHRSYSCQVTHEGSTVEKTVAPTECS

SEQ ID NO: 316 - protein, 214 aa, synthetic construct
  REGION 1..214: note = Description of Artificial Sequence: Synthetic polypeptide
DIQMTQSPSSLSASIGDRVTITCRASQDIRDYLGWYQQKPGKAPKRLIYGASSLQSGVPSRFSGSGSGTEFTLTISSLQPEDFATYYCLQHNNYPFTFGPGTKVDIKRTVAAPSVFIFPPSDEQLKSGTASVVCLLNNFYPREAKVQWKVDNALQSGNSQESVTEQDSKDSTYSLSSTLTLSKADYEKHKVYACEVTHQGLSSPVTKSFNRGEC

SEQ ID NO: 317 - protein, 214 aa, synthetic construct; identical to SEQ ID NO: 316
  REGION 1..214: note = Description of Artificial Sequence: Synthetic polypeptide

SEQ ID NO: 318 - protein, 213 aa, synthetic construct
  REGION 1..213: note = Description of Artificial Sequence: Synthetic polypeptide
DIQMTQSPSSLSASVGDRVTITCQASQDISNYLNWYQQKPGKAPKLLIYDASNLETGVPSRFSGSGSGTDFSFTISSLQPEDIATYYCQQYDILLTFGGGTKVEIKRTVAAPSVFIFPPSDEQLKSGTASVVCLLNNFYPREAKVQWKVDNALQSGNSQESVTEQDSKDSTYSLSSTLTLSKADYEKHKVYACEVTHQGLSSPVTKSFNRGEC

SEQ ID NO: 319 - protein, 220 aa, synthetic construct
  REGION 1..220: note = Description of Artificial Sequence: Synthetic polypeptide
DIVMTQSPDSLAVSLGERATINCKSSQSVLSSSNNKNYIAWYQQQPGHPPKLLIYWASTRESGVPDRFSGSGSGTDFTLTISSLQAEDVAVFYCQQYYSTPWTFGQGTKVEIKRTVAAPSVFIFPPSDEQLKSGTASVVCLLNNFYPREAKVQWKVDNALQSGNSQESVTEQDSKDSTYSLSSTLTLSKADYEKHKVYACEVTHQGLSSPVTKSFNRGEC

SEQ ID NO: 320 - protein, 220 aa, synthetic construct
  REGION 1..220: note = Description of Artificial Sequence: Synthetic polypeptide
DIVMTQSPDSLAVSLGERATINCKSSQSVLSSSNNKNYIAWYQQKPGHPPKLLIYWASTRESGVPDRFSGSGSGTDFTLTISSLQAEDVAVFYCQQYYSTPWTFGQGTKVEIKRTVAAPSVFIFPPSDEQLKSGTASVVCLLNNFYPREAKVQWKVDNALQSGNSQESVTEQDSKDSTYSLSSTLTLSKADYEKHKVYACEVTHQGLSSPVTKSFNRGEC

SEQ ID NO: 321 - protein, 220 aa, synthetic construct
  REGION 1..220: note = Description of Artificial Sequence: Synthetic polypeptide
DIVMTQSPDSLSVSLGERATINCKSSQSVLSSSNNKNYLAWYQQKPGQPPNLLIYWTSTRDSGVPDRFSGSGSGTDFTLTINSLQAEDVAVYYCQQYYRTPWTFGQGTKVEIKRTVAAPSVFIFPPSDEQLKSGTASVVCLLNNFYPREAKVQWKVDNALQSGNSQESVTEQDSKDSTYSLSSTLTLSKADYEKHKVYACEVTHQGLSSPVTKSFNRGEC

SEQ ID NO: 322 - protein, 220 aa, synthetic construct; identical to SEQ ID NO: 321
  REGION 1..220: note = Description of Artificial Sequence: Synthetic polypeptide

SEQ ID NO: 323 - protein, 215 aa, synthetic construct
  REGION 1..215: note = Description of Artificial Sequence: Synthetic polypeptide
EIVLTQSPGTLSLSPGERATLSCRASQSISYSYLAWYQQKPGQAPRLLIYGASSRATGIPDRFSGSGSGTDFTLTISRQEPDDFAVYYCQQYGSSPLTFGGGTKVEIKRTVAAPSVFIFPPSDEQLKSGTASVVCLLNNFYPREAKVQWKVDNALQSGNSQESVTEQDSKDSTYSLSSTLTLSKADYEKHKVYACEVTHQGLSSPVTKSFNRGEC

SEQ ID NO: 324 - protein, 214 aa, synthetic construct
  REGION 1..214: note = Description of Artificial Sequence: Synthetic polypeptide
EIVMTQSPATLSVSPGERATLSCRASQSVSSNLAWYQQKPGQAPRLLIYGAATRATGIPARVSGSGSGTEFTLTISSLQSEDFAVYYCQQYNNWPLTFGGGTKVEIKRTVAAPSVFIFPPSDEQLKSGTASVVCLLNNFYPREAKVQWKVDNALQSGNSQESVTEQDSKDSTYSLSSTLTLSKADYEKHKVYACEVTHQGLSSPVTKSFNRGEC

SEQ ID NO: 325 - protein, 214 aa, synthetic construct
  REGION 1..214: note = Description of Artificial Sequence: Synthetic polypeptide
DIQMTQSPSSLSASVGDRVTITCRASQGIRNELGWYQQKPGKAPKRLIYGASSLQSGVPSRFSGSGSGTEFTLTISSLQPEDFVTYYCLQHNSYPFTFGPGTKVDVKRTVAAPSVFIFPPSDEQLKSGTASVVCLLNNFYPREAKVQWKVDNALQSGNSQESVTEQDSKDSTYSLSSTLTLSKADYEKHKVYACEVTHQGLSSPVTKSFNRGEC

SEQ ID NO: 326 - protein, 213 aa, synthetic construct
  REGION 1..213: note = Description of Artificial Sequence: Synthetic polypeptide
DIQMTQSPSSLSASVGDRVTITCQASQDITNYLNWYQQKPGKAPKLLIYDASNLEPGVPSRFSGSGSGTDFTFTISSLQPEDIATYYCQQYDDLFTFGPGTKVDIKRTVAAPSVFIFPPSDEQLKSGTASVVCLLNNFYPREAKVQWKVDNALQSGNSQESVTEQDSKDSTYSLSSTLTLSKADYEKHKVYACEVTHQGLSSPVTKSFNRGEC

SEQ ID NO: 327 - protein, 214 aa, synthetic construct
  REGION 1..214: note = Description of Artificial Sequence: Synthetic polypeptide
DIQMTQSPSSVSASVGDRVTITCRASQGLIIWLAWYQQKPGKAPKLLIYAASSLQSGVPSRFSGSGSGTDFTLTISSLQPEDFATYYCQQTNSFPPTFGQGTKVEIKRTVAAPSVFIFPPSDEQLKSGTASVVCLLNNFYPREAKVQWKVDNALQSGNSQESVTEQDSKDSTYSLSSTLTLSKADYEKHKVYACEVTHQGLSSPVTKSFNRGEC

SEQ ID NO: 328 - protein, 214 aa, synthetic construct; identical to SEQ ID NO: 327
  REGION 1..214: note = Description of Artificial Sequence: Synthetic polypeptide

SEQ ID NO: 329 - protein, 214 aa, synthetic construct
  REGION 1..214: note = Description of Artificial Sequence: Synthetic polypeptide
DIQMTQSPSSLSASVGDRVTITCRASQGIRNELGWYQQKPGKAPKLLIYGASSLQSGVPSRFSGSGSGTEFTLTISSLQPEDFVTYYCLQHNSYPFTFGQGTKVDVKRTVAAPSVFIFPPSDEQLKSGTASVVCLLNNFYPREAKVQWKVDNALQSGNSQESVTEQDSKDSTYSLSSTLTLSKADYEKHKVYACEVTHQGLSSPVTKSFNRGEC

SEQ ID NO: 330 - protein, 214 aa, synthetic construct; identical to SEQ ID NO: 329
  REGION 1..214: note = Description of Artificial Sequence: Synthetic polypeptide

SEQ ID NO: 331 - protein, 214 aa, synthetic construct; identical to SEQ ID NO: 329
  REGION 1..214: note = Description of Artificial Sequence: Synthetic polypeptide

SEQ ID NO: 332 - protein, 214 aa, synthetic construct
  REGION 1..214: note = Description of Artificial Sequence: Synthetic polypeptide
DIQMTQSPSSLSASVGDRVTITCRASQGIRNELGWYQQKPGKAPKLLIYGASSLQSGVPSRFSGSGSGTEFTLTISSLQPEDFVTYYCLQHNSYPFTFGPGTKVDVKRTVAAPSVFIFPPSDEQLKSGTASVVCLLNNFYPREAKVQWKVDNALQSGNSQESVTEQDSKDSTYSLSSTLTLSKADYEKHKVYACEVTHQGLSSPVTKSFNRGEC

SEQ ID NO: 333 - protein, 214 aa, synthetic construct
  REGION 1..214: note = Description of Artificial Sequence: Synthetic polypeptide
DIQMTQSPSSLSASVGDRVTITCRASQGIRNELGWYQQKPGKAPKRLIYGASSLQSGVPSRFSGSGSGTEFTLTISSLQPEDFVTYYCLQHNSYPFTFGQGTKVDVKRTVAAPSVFIFPPSDEQLKSGTASVVCLLNNFYPREAKVQWKVDNALQSGNSQESVTEQDSKDSTYSLSSTLTLSKADYEKHKVYACEVTHQGLSSPVTKSFNRGEC

SEQ ID NO: 334 - protein, 214 aa, synthetic construct; identical to SEQ ID NO: 329
  REGION 1..214: note = Description of Artificial Sequence: Synthetic polypeptide

SEQ ID NO: 335 - protein, 214 aa, synthetic construct
  REGION 1..214: note = Description of Artificial Sequence: Synthetic polypeptide
DIQMTQSPSSLSASIGDRVTITCRASQDIRDYLGWYQQKPGKAPKLLIYGASSLQSGVPSRFSGSGSGTEFTLTISSLQPEDFATYYCLQHNNYPFTFGQGTKVDIKRTVAAPSVFIFPPSDEQLKSGTASVVCLLNNFYPREAKVQWKVDNALQSGNSQESVTEQDSKDSTYSLSSTLTLSKADYEKHKVYACEVTHQGLSSPVTKSFNRGEC

SEQ ID NO: 336 - protein, 214 aa, synthetic construct
  REGION 1..214: note = Description of Artificial Sequence: Synthetic polypeptide
DIQMTQSPSSLSASIGDRVTITCRASQDIRDYLGWYQQKPGKAPKRLIYGASSLQSGVPSRFSGSGSGTEFTLTISSLQPEDFATYYCLQHNNYPFTFGQGTKVDIKRTVAAPSVFIFPPSDEQLKSGTASVVCLLNNFYPREAKVQWKVDNALQSGNSQESVTEQDSKDSTYSLSSTLTLSKADYEKHKVYACEVTHQGLSSPVTKSFNRGEC

SEQ ID NO: 337 - protein, 214 aa, synthetic construct
  REGION 1..214: note = Description of Artificial Sequence: Synthetic polypeptide
DIQMTQSPSSLSASIGDRVTITCRASQDIRDYLGWYQQKPGKAPKLLIYGASSLQSGVPSRFSGSGSGTEFTLTISSLQPEDFATYYCLQHNNYPFTFGPGTKVDIKRTVAAPSVFIFPPSDEQLKSGTASVVCLLNNFYPREAKVQWKVDNALQSGNSQESVTEQDSKDSTYSLSSTLTLSKADYEKHKVYACEVTHQGLSSPVTKSFNRGEC

SEQ ID NO: 338 - protein, 214 aa, synthetic construct; identical to SEQ ID NO: 335
  REGION 1..214: note = Description of Artificial Sequence: Synthetic polypeptide

SEQ ID NO: 339 - protein, 214 aa, synthetic construct; identical to SEQ ID NO: 335
  REGION 1..214: note = Description of Artificial Sequence: Synthetic polypeptide

SEQ ID NO: 340 - protein, 214 aa, synthetic construct; identical to SEQ ID NO: 335
  REGION 1..214: note = Description of Artificial Sequence: Synthetic polypeptide

SEQ ID NO: 341 - protein, 214 aa, synthetic construct; identical to SEQ ID NO: 335
  REGION 1..214: note = Description of Artificial Sequence: Synthetic polypeptide

SEQ ID NO: 342 - protein, 214 aa, synthetic construct
  REGION 1..214: note = Description of Artificial Sequence: Synthetic polypeptide
DIQMTQSPSSLSASIGDRVTITCRASQDLRNYLGWYHQKPGKAPKRLIYGASSLQSGVPSRFSGSGSGTEFTLTISSLQPEDFATYYCLQHNNYPFTFGPGTKVDIKRTVAAPSVFIFPPSDEQLKSGTASVVCLLNNFYPREAKVQWKVDNALQSGNSQESVTEQDSKDSTYSLSSTLTLSKADYEKHKVYACEVTHQGLSSPVTKSFNRGEC

SEQ ID NO: 343 - protein, 214 aa, synthetic construct
  REGION 1..214: note = Description of Artificial Sequence: Synthetic polypeptide
DIQMTQSPSSLSASIGDRVTITCRASQDLRNYLGWYQQKPGKAPKLLIYGASSLQSGVPSRFSGSGSGTEFTLTISSLQPEDFATYYCLQHNNYPFTFGPGTKVDIKRTVAAPSVFIFPPSDEQLKSGTASVVCLLNNFYPREAKVQWKVDNALQSGNSQESVTEQDSKDSTYSLSSTLTLSKADYEKHKVYACEVTHQGLSSPVTKSFNRGEC

SEQ ID NO: 344 - protein, 214 aa, synthetic construct; identical to SEQ ID NO: 343
  REGION 1..214: note = Description of Artificial Sequence: Synthetic polypeptide

SEQ ID NO: 345 - protein, 214 aa, synthetic construct
  REGION 1..214: note = Description of Artificial Sequence: Synthetic polypeptide
DIQMTQSPSSLSASIGDRVTITCRASQDLRNYLGWYHQKPGKAPKLLIYGASSLQSGVPSRFSGSGSGTEFTLTISSLQPEDFATYYCLQHNNYPFTFGPGTKVDIKRTVAAPSVFIFPPSDEQLKSGTASVVCLLNNFYPREAKVQWKVDNALQSGNSQESVTEQDSKDSTYSLSSTLTLSKADYEKHKVYACEVTHQGLSSPVTKSFNRGEC

SEQ ID NO: 346 - protein, 214 aa, synthetic construct
  REGION 1..214: note = Description of Artificial Sequence: Synthetic polypeptide
DIQMTQSPSSLSASIGDRVTITCRASQDLRNYLGWYQQKPGKAPKRLIYGASSLQSGVPSRFSGSGSGTEFTLTISSLQPEDFATYYCLQHNNYPFTFGPGTKVDIKRTVAAPSVFIFPPSDEQLKSGTASVVCLLNNFYPREAKVQWKVDNALQSGNSQESVTEQDSKDSTYSLSSTLTLSKADYEKHKVYACEVTHQGLSSPVTKSFNRGEC

SEQ ID NO: 347 - protein, 214 aa, synthetic construct; identical to SEQ ID NO: 346
  REGION 1..214: note = Description of Artificial Sequence: Synthetic polypeptide

SEQ ID NO: 348 - protein, 214 aa, synthetic construct; identical to SEQ ID NO: 345
  REGION 1..214: note = Description of Artificial Sequence: Synthetic polypeptide

SEQ ID NO: 349 - protein, 214 aa, synthetic construct; identical to SEQ ID NO: 342
  REGION 1..214: note = Description of Artificial Sequence: Synthetic polypeptide

SEQ ID NO: 350 - protein, 214 aa, synthetic construct; identical to SEQ ID NO: 343
  REGION 1..214: note = Description of Artificial Sequence: Synthetic polypeptide

SEQ ID NO: 351 - protein, 214 aa, synthetic construct; identical to SEQ ID NO: 343
  REGION 1..214: note = Description of Artificial Sequence: Synthetic polypeptide

SEQ ID NO: 352 - protein, 214 aa, synthetic construct
  REGION 1..214: note = Description of Artificial Sequence: Synthetic polypeptide
DIQMTQSPSSLSASIGDRVTITCRASQDLRNYLGWYQQKPGKAPKLLIYGASSLQSGVPSRFSGSGSGTEFTLTISSLQPEDFATYYCLQHNNYPFTFGQGTKVDIKRTVAAPSVFIFPPSDEQLKSGTASVVCLLNNFYPREAKVQWKVDNALQSGNSQESVTEQDSKDSTYSLSSTLTLSKADYEKHKVYACEVTHQGLSSPVTKSFNRGEC

SEQ ID NO: 353 - protein, 214 aa, synthetic construct; identical to SEQ ID NO: 343
  REGION 1..214: note = Description of Artificial Sequence: Synthetic polypeptide

SEQ ID NO: 354 - protein, 213 aa, synthetic construct
  REGION 1..213: note = Description of Artificial Sequence: Synthetic polypeptide
DIQMTQSPSSLSASVGDRVTITCQASQDISNYLNWYQQKPGKAPKLLIYDASNLETGVPSRFSGSGSGTDFSLTISSLQPEDFATYYCQQYDILLTFGGGTKVEIKRTVAAPSVFIFPPSDEQLKSGTASVVCLLNNFYPREAKVQWKVDNALQSGNSQESVTEQDSKDSTYSLSSTLTLSKADYEKHKVYACEVTHQGLSSPVTKSFNRGEC

SEQ ID NO: 355 - protein, 213 aa, synthetic construct; identical to SEQ ID NO: 354
  REGION 1..213: note = Description of Artificial Sequence: Synthetic polypeptide

SEQ ID NO: 356 - protein, 213 aa, synthetic construct
  REGION 1..213: note = Description of Artificial Sequence: Synthetic polypeptide
DIQMTQSPSSLSASVGDRVTITCQASQDISNYLNWYQQKPGKAPKLLIYDASNLETGVPSRFSGSGSGTDFSLTISSLQPEDIATYYCQQYDILLTFGGGTKVEIKRTVAAPSVFIFPPSDEQLKSGTASVVCLLNNFYPREAKVQWKVDNALQSGNSQESVTEQDSKDSTYSLSSTLTLSKADYEKHKVYACEVTHQGLSSPVTKSFNRGEC

SEQ ID NO: 357 - protein, 213 aa, synthetic construct
  REGION 1..213: note = Description of Artificial Sequence: Synthetic polypeptide
DIQMTQSPSSLSASVGDRVTITCQASQDISNYLNWYQQKPGKAPKLLIYDASNLETGVPSRFSGSGSGTDFSFTISSLQPEDFATYYCQQYDILLTFGGGTKVEIKRTVAAPSVFIFPPSDEQLKSGTASVVCLLNNFYPREAKVQWKVDNALQSGNSQESVTEQDSKDSTYSLSSTLTLSKADYEKHKVYACEVTHQGLSSPVTKSFNRGEC

SEQ ID NO: 358 - protein, 213 aa, synthetic construct; identical to SEQ ID NO: 356
  REGION 1..213: note = Description of Artificial Sequence: Synthetic polypeptide

SEQ ID NO: 359 - protein, 213 aa, synthetic construct; identical to SEQ ID NO: 357
  REGION 1..213: note = Description of Artificial Sequence: Synthetic polypeptide

SEQ ID NO: 360 - protein, 213 aa, synthetic construct; identical to SEQ ID NO: 318
  REGION 1..213: note = Description of Artificial Sequence: Synthetic polypeptide

SEQ ID NO: 361 - protein, 213 aa, synthetic construct; identical to SEQ ID NO: 354
  REGION 1..213: note = Description of Artificial Sequence: Synthetic polypeptide

SEQ ID NO: 362 - protein, 213 aa, synthetic construct; identical to SEQ ID NO: 354
  REGION 1..213: note = Description of Artificial Sequence: Synthetic polypeptide

SEQ ID NO: 363 - protein, 214 aa, synthetic construct; identical to SEQ ID NO: 316
  REGION 1..214: note = Description of Artificial Sequence: Synthetic polypeptide

SEQ ID NO: 364 - protein, 214 aa, synthetic construct; identical to SEQ ID NO: 316
  REGION 1..214: note = Description of Artificial Sequence: Synthetic polypeptide

SEQ ID NO: 365 - protein, 214 aa, synthetic construct; identical to SEQ ID NO: 335
  REGION 1..214: note = Description of Artificial Sequence: Synthetic polypeptide

SEQ ID NO: 366 - protein, 214 aa, synthetic construct; identical to SEQ ID NO: 335
  REGION 1..214: note = Description of Artificial Sequence: Synthetic polypeptide

SEQ ID NO: 367 - protein, 214 aa, synthetic construct; identical to SEQ ID NO: 337
  REGION 1..214: note = Description of Artificial Sequence: Synthetic polypeptide

SEQ ID NO: 368 - protein, 214 aa, synthetic construct; identical to SEQ ID NO: 337
  REGION 1..214: note = Description of Artificial Sequence: Synthetic polypeptide

SEQ ID NO: 369 - protein, 214 aa, synthetic construct; identical to SEQ ID NO: 337
  REGION 1..214: note = Description of Artificial Sequence: Synthetic polypeptide

SEQ ID NO: 370 - protein, 213 aa, synthetic construct
  REGION 1..213: note = Description of Artificial Sequence: Synthetic polypeptide
DIQMTQSPSSLSASVGDRVTITCQASQDITNYLNWYQQKPGKAPKLLIYDASNLEPGVPSRFSGSGSGTDFTLTISSLQPEDFATYYCQQYDDLFTFGPGTKVDIKRTVAAPSVFIFPPSDEQLKSGTASVVCLLNNFYPREAKVQWKVDNALQSGNSQESVTEQDSKDSTYSLSSTLTLSKADYEKHKVYACEVTHQGLSSPVTKSFNRGEC

SEQ ID NO: 371 - protein, 213 aa, synthetic construct
  REGION 1..213: note = Description of Artificial Sequence: Synthetic polypeptide
DIQMTQSPSSLSASVGDRVTITCQASQDITNYLNWYQQKPGKAPKLLIYDASNLEPGVPSRFSGSGSGTDFTLTISSLQPEDIATYYCQQYDDLFTFGPGTKVDIKRTVAAPSVFIFPPSDEQLKSGTASVVCLLNNFYPREAKVQWKVDNALQSGNSQESVTEQDSKDSTYSLSSTLTLSKADYEKHKVYACEVTHQGLSSPVTKSFNRGEC

SEQ ID NO: 372 - protein, 213 aa, synthetic construct; identical to SEQ ID NO: 370
  REGION 1..213: note = Description of Artificial Sequence: Synthetic polypeptide

SEQ ID NO: 373 - protein, 213 aa, synthetic construct
  REGION 1..213: note = Description of Artificial Sequence: Synthetic polypeptide
DIQMTQSPSSLSASVGDRVTITCQASQDITNYLNWYQQKPGKAPKLLIYDASNLEPGVPSRFSGSGSGTDFTFTISSLQPEDFATYYCQQYDDLFTFGPGTKVDIKRTVAAPSVFIFPPSDEQLKSGTASVVCLLNNFYPREAKVQWKVDNALQSGNSQESVTEQDSKDSTYSLSSTLTLSKADYEKHKVYACEVTHQGLSSPVTKSFNRGEC

SEQ ID NO: 374 - protein, 213 aa, synthetic construct; identical to SEQ ID NO: 371
  REGION 1..213: note = Description of Artificial Sequence: Synthetic polypeptide

SEQ ID NO: 375 - protein, 213 aa, synthetic construct; identical to SEQ ID NO: 373
  REGION 1..213: note = Description of Artificial Sequence: Synthetic polypeptide

SEQ ID NO: 376 - protein, 213 aa, synthetic construct; identical to SEQ ID NO: 326
  REGION 1..213: note = Description of Artificial Sequence: Synthetic polypeptide

SEQ ID NO: 377 - protein, 213 aa, synthetic construct; identical to SEQ ID NO: 370
  REGION 1..213: note = Description of Artificial Sequence: Synthetic polypeptide

SEQ ID NO: 378 - protein, 213 aa, synthetic construct; identical to SEQ ID NO: 370
  REGION 1..213: note = Description of Artificial Sequence: Synthetic polypeptide

SEQ ID NO: 379 - protein, 213 aa, synthetic construct
  REGION 1..213: note = Description of Artificial Sequence: Synthetic polypeptide
DIQMTQSPSSLSASVGDRVTITCQASQDITNYLNWYQQKPGKAPKLLIYDASNLEPGVPSRFSGSGSGTDFTLTISSLQPEDFATYYCQQYDDLFTFGQGTKVDIKRTVAAPSVFIFPPSDEQLKSGTASVVCLLNNFYPREAKVQWKVDNALQSGNSQESVTEQDSKDSTYSLSSTLTLSKADYEKHKVYACEVTHQGLSSPVTKSFNRGEC

SEQ ID NO: 380 - protein, 213 aa, synthetic construct; identical to SEQ ID NO: 379
  REGION 1..213: note = Description of Artificial Sequence: Synthetic polypeptide

SEQ ID NO: 381 - protein, 214 aa, synthetic construct
  REGION 1..214: note = Description of Artificial Sequence: Synthetic polypeptide
EIVLTQSPGTLSLSPGERATLSCRASQIFTSTYLAWYQQKPGQAPRLLIYGASSRATGIPDRFSGSGSGTDFTLTISRLEPEDFAVYYCQQYGSSPRFGQGTRLEIKRTVAAPSVFIFPPSDEQLKSGTASVVCLLNNFYPREAKVQWKVDNALQSGNSQESVTEQDSKDSTYSLSSTLTLSKADYEKHKVYACEVTHQGLSSPVTKSFNRGEC

SEQ ID NO: 382 - protein, 214 aa, synthetic construct; identical to SEQ ID NO: 381
  REGION 1..214: note = Description of Artificial Sequence: Synthetic polypeptide

SEQ ID NO: 383 - protein, 214 aa, synthetic construct; identical to SEQ ID NO: 381
  REGION 1..214: note = Description of Artificial Sequence: Synthetic polypeptide

SEQ ID NO: 384 - protein, 214 aa, synthetic construct; identical to SEQ ID NO: 381
  REGION 1..214: note = Description of Artificial Sequence: Synthetic polypeptide

SEQ ID NO: 385 - protein, 214 aa, synthetic construct
  REGION 1..214: note = Description of Artificial Sequence: Synthetic polypeptide
EIVMTQSPATLSVSPGERATLSCRASQSVSSNLAWYQQKPGQAPRLLIYGAATRATGIPARFSGSGSGTEFTLTISSLQSEDFAVYYCQQYNNWPLTFGGGTKVEIKRTVAAPSVFIFPPSDEQLKSGTASVVCLLNNFYPREAKVQWKVDNALQSGNSQESVTEQDSKDSTYSLSSTLTLSKADYEKHKVYACEVTHQGLSSPVTKSFNRGEC

SEQ ID NO: 386 - protein, 214 aa, synthetic construct; identical to SEQ ID NO: 385
  REGION 1..214: note = Description of Artificial Sequence: Synthetic polypeptide

SEQ ID NO: 387 - protein, 214 aa, synthetic construct; identical to SEQ ID NO: 385
  REGION 1..214: note = Description of Artificial Sequence: Synthetic polypeptide

SEQ ID NO: 388 - protein, 214 aa, synthetic construct; identical to SEQ ID NO: 324
  REGION 1..214: note = Description of Artificial Sequence: Synthetic polypeptide

SEQ ID NO: 389 - protein, 214 aa, synthetic construct
  REGION 1..214: note = Description of Artificial Sequence: Synthetic polypeptide
EIVMTQSPATLSVSPGERATLSCRASQSVSSNLAWYQQKPGQAPRLLIYGAATRATGIPARFSGSGSGTEFTLTISSLEPEDFAVYYCQQYNNFPLTFGGGTKVEIKRTVAAPSVFIFPPSDEQLKSGTASVVCLLNNFYPREAKVQWKVDNALQSGNSQESVTEQDSKDSTYSLSSTLTLSKADYEKHKVYACEVTHQGLSSPVTKSFNRGEC

SEQ ID NO: 390 - protein, 214 aa, synthetic construct
  REGION 1..214: note = Description of Artificial Sequence: Synthetic polypeptide
EIVMTQSPATLSVSPGERATLSCRASQSVSSNLAWYQQKPGQAPRLLIYGAATRATGIPARFSGSGSGTEFTLTISSLEPEDFAVYYCQQYNNYPLTFGGGTKVEIKRTVAAPSVFIFPPSDEQLKSGTASVVCLLNNFYPREAKVQWKVDNALQSGNSQESVTEQDSKDSTYSLSSTLTLSKADYEKHKVYACEVTHQGLSSPVTKSFNRGEC

SEQ ID NO: 391 - protein, 214 aa, synthetic construct
  REGION 1..214: note = Description of Artificial Sequence: Synthetic polypeptide
EIVMTQSPATLSVSPGERATLSCRASQSVSSNLAWYQQKPGQAPRLLIYGAATRATGIPARFSGSGSGTEFTLTISSLEPEDFAVYYCQQYNNWPLTFGGGTKVEIKRTVAAPSVFIFPPSDEQLKSGTASVVCLLNNFYPREAKVQWKVDNALQSGNSQESVTEQDSKDSTYSLSSTLTLSKADYEKHKVYACEVTHQGLSSPVTKSFNRGEC

SEQ ID NO: 392 - protein, 214 aa, synthetic construct; identical to SEQ ID NO: 391
  REGION 1..214: note = Description of Artificial Sequence: Synthetic polypeptide

SEQ ID NO: 393 - protein, 215 aa, synthetic construct
  REGION 1..215: note = Description of Artificial Sequence: Synthetic polypeptide
EIVLTQSPGTLSLSPGERATLSCRASQSISYSYLAWYQQKPGQAPRLLIYGASSRATGIPDRFSGSGSGTDFTLTISRLEPDDFAVYYCQQYGSSPLTFGGGTKVEIKRTVAAPSVFIFPPSDEQLKSGTASVVCLLNNFYPREAKVQWKVDNALQSGNSQESVTEQDSKDSTYSLSSTLTLSKADYEKHKVYACEVTHQGLSSPVTKSFNRGEC

SEQ ID NO: 394 - protein, 215 aa, synthetic construct; identical to SEQ ID NO: 323
  REGION 1..215: note = Description of Artificial Sequence: Synthetic polypeptide

SEQ ID NO: 395 - protein, 215 aa, synthetic construct; identical to SEQ ID NO: 393
  REGION 1..215: note = Description of Artificial Sequence: Synthetic polypeptide

SEQ ID NO: 396 - protein, 215 aa, synthetic construct; identical to SEQ ID NO: 393
  REGION 1..215: note = Description of Artificial Sequence: Synthetic polypeptide

SEQ ID NO: 397 - protein, 215 aa, synthetic construct; identical to SEQ ID NO: 393
  REGION 1..215: note = Description of Artificial Sequence: Synthetic polypeptide

SEQ ID NO: 398 - protein, 215 aa, synthetic construct; identical to SEQ ID NO: 323
  REGION 1..215: note = Description of Artificial Sequence: Synthetic polypeptide

SEQ ID NO: 399 - protein, 215 aa, synthetic construct; identical to SEQ ID NO: 323
  REGION 1..215: note = Description of Artificial Sequence: Synthetic polypeptide

SEQ ID NO: 400 - protein, 220 aa, synthetic construct; identical to SEQ ID NO: 319
  REGION 1..220: note = Description of Artificial Sequence: Synthetic polypeptide

SEQ ID NO: 401 - protein, 220 aa, synthetic construct; identical to SEQ ID NO: 319
  REGION 1..220: note = Description of Artificial Sequence: Synthetic polypeptide

SEQ ID NO: 402 - protein, 220 aa, synthetic construct; identical to SEQ ID NO: 319
  REGION 1..220: note = Description of Artificial Sequence: Synthetic polypeptide

SEQ ID NO: 403 - protein, 220 aa, synthetic construct; identical to SEQ ID NO: 319
  REGION 1..220: note = Description of Artificial Sequence: Synthetic polypeptide

SEQ ID NO: 404 - protein, 220 aa, synthetic construct; identical to SEQ ID NO: 319
  REGION 1..220: note = Description of Artificial Sequence: Synthetic polypeptide

SEQ ID NO: 405 - protein, 220 aa, synthetic construct; identical to SEQ ID NO: 319
  REGION 1..220: note = Description of Artificial Sequence: Synthetic polypeptide

SEQ ID NO: 406 - protein, 220 aa, synthetic construct; identical to SEQ ID NO: 319
  REGION 1..220: note = Description of Artificial Sequence: Synthetic polypeptide

SEQ ID NO: 407 - protein, 220 aa, synthetic construct; identical to SEQ ID NO: 319
  REGION 1..220: note = Description of Artificial Sequence: Synthetic polypeptide

SEQ ID NO: 408 - protein, 220 aa, synthetic construct; identical to SEQ ID NO: 319
  REGION 1..220: note = Description of Artificial Sequence: Synthetic polypeptide

SEQ ID NO: 409 - protein, 220 aa, synthetic construct
  REGION 1..220: note = Description of Artificial Sequence: Synthetic polypeptide
DIVMTQSPDSLAVSLGERATINCKSSQSVLSSSNNKNYIAWYQQKPGQPPKLLIYWASTRESGVPDRFSGSGSGTDFTLTISSLQAEDVAVFYCQQYYSTPWTFGQGTKVEIKRTVAAPSVFIFPPSDEQLKSGTASVVCLLNNFYPREAKVQWKVDNALQSGNSQESVTEQDSKDSTYSLSSTLTLSKADYEKHKVYACEVTHQGLSSPVTKSFNRGEC

SEQ ID NO: 410 - protein, 220 aa, synthetic construct; identical to SEQ ID NO: 409
  REGION 1..220: note = Description of Artificial Sequence: Synthetic polypeptide

SEQ ID NO: 411 - protein, 220 aa, synthetic construct
  REGION 1..220: note = Description of Artificial Sequence: Synthetic polypeptide
DIVMTQSPDSLSVSLGERATINCKSSQSVLSSSNNKNYLAWYQQKPGQPPNLLIYWTSTRESGVPDRFSGSGSGTDFTLTINSLQAEDVAVYYCQQYYRTPWTFGQGTKVEIKRTVAAPSVFIFPPSDEQLKSGTASVVCLLNNFYPREAKVQWKVDNALQSGNSQESVTEQDSKDSTYSLSSTLTLSKADYEKHKVYACEVTHQGLSSPVTKSFNRGEC

SEQ ID NO: 412 - protein, 220 aa, synthetic construct; identical to SEQ ID NO: 411
  REGION 1..220: note = Description of Artificial Sequence: Synthetic polypeptide

SEQ ID NO: 413 - protein, 220 aa, synthetic construct; identical to SEQ ID NO: 321
  REGION 1..220: note = Description of Artificial Sequence: Synthetic polypeptide

SEQ ID NO: 414 - protein, 220 aa, synthetic construct; identical to SEQ ID NO: 411
  REGION 1..220: note = Description of Artificial Sequence: Synthetic polypeptide

SEQ ID NO: 415 - protein, 220 aa, synthetic construct; identical to SEQ ID NO: 411
  REGION 1..220: note = Description of Artificial Sequence: Synthetic polypeptide

SEQ ID NO: 416 - protein, 220 aa, synthetic construct; identical to SEQ ID NO: 321
  REGION 1..220: note = Description of Artificial Sequence: Synthetic polypeptide

SEQ ID NO: 417 - protein, 220 aa, synthetic construct; identical to SEQ ID NO: 321
  REGION 1..220: note = Description of Artificial Sequence: Synthetic polypeptide

SEQ ID NO: 418 - protein, 220 aa, synthetic construct
  REGION 1..220: note = Description of Artificial Sequence: Synthetic polypeptide
DIVMTQSPDSLAVSLGERATINCKSSQSVLSSSNNKNYLAWYQQKPGQPPKLLIYWTSTRESGVPDRFSGSGSGTDFTLTINSLQAEDVAVYYCQQYYRTPWTFGQGTKVEIKRTVAAPSVFIFPPSDEQLKSGTASVVCLLNNFYPREAKVQWKVDNALQSGNSQESVTEQDSKDSTYSLSSTLTLSKADYEKHKVYACEVTHQGLSSPVTKSFNRGEC

SEQ ID NO: 419 - protein, 220 aa, synthetic construct; identical to SEQ ID NO: 411
  REGION 1..220: note = Description of Artificial Sequence: Synthetic polypeptide

SEQ ID NO: 420 - protein, 220 aa, synthetic construct; identical to SEQ ID NO: 320
  REGION 1..220: note = Description of Artificial Sequence: Synthetic polypeptide

SEQ ID NO: 421 - protein, 220 aa, synthetic construct; identical to SEQ ID NO: 320
  REGION 1..220: note = Description of Artificial Sequence: Synthetic polypeptide

SEQ ID NO: 422 - protein, 220 aa, synthetic construct; identical to SEQ ID NO: 320
  REGION 1..220: note = Description of Artificial Sequence: Synthetic polypeptide

SEQ ID NO: 423 - protein, 220 aa, synthetic construct; identical to SEQ ID NO: 409
  REGION 1..220: note = Description of Artificial Sequence: Synthetic polypeptide

SEQ ID NO: 424 - protein, 220 aa, synthetic construct; identical to SEQ ID NO: 409
  REGION 1..220: note = Description of Artificial Sequence: Synthetic polypeptide

SEQ ID NO: 425 - protein, 220 aa, synthetic construct; identical to SEQ ID NO: 321
  REGION 1..220: note = Description of Artificial Sequence: Synthetic polypeptide

SEQ ID NO: 426 - protein, 220 aa, synthetic construct; identical to SEQ ID NO: 321
  REGION 1..220: note = Description of Artificial Sequence: Synthetic polypeptide

SEQ ID NO: 427 - protein, 220 aa, synthetic construct; identical to SEQ ID NO: 321
  REGION 1..220: note = Description of Artificial Sequence: Synthetic polypeptide

SEQ ID NO: 428 - protein, 220 aa, synthetic construct; identical to SEQ ID NO: 321
  REGION 1..220: note = Description of Artificial Sequence: Synthetic polypeptide

SEQ ID NO: 429 - protein, 220 aa, synthetic construct; identical to SEQ ID NO: 321
  REGION 1..220: note = Description of Artificial Sequence: Synthetic polypeptide

SEQ ID NO: 430 - protein, 220 aa, synthetic construct; identical to SEQ ID NO: 321
  REGION 1..220: note = Description of Artificial Sequence: Synthetic polypeptide

SEQ ID NO: 431 - protein, 220 aa, synthetic construct; identical to SEQ ID NO: 321
  REGION 1..220: note = Description of Artificial Sequence: Synthetic polypeptide

SEQ ID NO: 432 - protein, 220 aa, synthetic construct; identical to SEQ ID NO: 411
  REGION 1..220: note = Description of Artificial Sequence: Synthetic polypeptide

SEQ ID NO: 433 - protein, 220 aa, synthetic construct; identical to SEQ ID NO: 411
  REGION 1..220: note = Description of Artificial Sequence: Synthetic polypeptide

SEQ ID NO: 434 - protein, 220 aa, synthetic construct; identical to SEQ ID NO: 411
  REGION 1..220: note = Description of Artificial Sequence: Synthetic polypeptide

SEQ ID NO: 435 - protein, 220 aa, synthetic construct; identical to SEQ ID NO: 411
  REGION 1..220: note = Description of Artificial Sequence: Synthetic polypeptide

SEQ ID NO: 436 - protein, 220 aa, synthetic construct
  REGION 1..220: note = Description of Artificial Sequence: Synthetic polypeptide
DIVMTQSPDSLAVSLGERATINCKSSQSVLSSSNNKNYLAWYQQKPGQPPKLLIYWTSTRDSGVPDRFSGSGSGTDFTLTINSLQAEDVAVYYCQQYYRTPWTFGQGTKVEIKRTVAAPSVFIFPPSDEQLKSGTASVVCLLNNFYPREAKVQWKVDNALQSGNSQESVTEQDSKDSTYSLSSTLTLSKADYEKHKVYACEVTHQGLSSPVTKSFNRGEC

SEQ ID NO: 437 - protein, 220 aa, synthetic construct; identical to SEQ ID NO: 418
  REGION 1..220: note = Description of Artificial Sequence: Synthetic polypeptide

SEQ ID NO: 438 - protein, 216 aa, synthetic construct
  REGION 1..216: note = Description of Artificial Sequence: Synthetic polypeptide
QSVLTQPPSASGTPGQRVTISCSGSSSNIGSQTVNWYQHLPGTAPKLLIYTNNQRPSGVPDRFSGSKSGTSASLAISGLQSEDEADYFCATFDESLSGPVFGGGTKLTVLGQPKAAPSVTLFPPSSEELQANKATLVCLISDFYPGAVTVAWKADSSPVKAGVETTTPSKQSNNKYAASSYLSLTPEQWKSHRSYSCQVTHEGSTVEKTVAPTECS

SEQ ID NO: 439 - protein, 216 aa, synthetic construct
  REGION 1..216: note = Description of Artificial Sequence: Synthetic polypeptide
QSVLTQPPSASGTPGQRVTISCSGSSSNIGSQTVNWYQHLPGTAPKLLIYTNNQRPSGVPDRFSGSKSGTSASLAISGLQSEDEADYFCATFDESLQGPVFGGGTKLTVLGQPKAAPSVTLFPPSSEELQANKATLVCLISDFYPGAVTVAWKADSSPVKAGVETTTPSKQSNNKYAASSYLSLTPEQWKSHRSYSCQVTHEGSTVEKTVAPTECS

SEQ ID NO: 440 - protein, 216 aa, synthetic construct
  REGION 1..216: note = Description of Artificial Sequence: Synthetic polypeptide
QSVLTQPPSASGTPGQRVTISCSGSSSNIGSNYVNWYQHLPGTAPKLLIYTNNQRPSGVPDRFSGSKSGTSASLAISGLQSEDEADYFCATFDESLSGPVFGGGTKLTVLGQPKAAPSVTLFPPSSEELQANKATLVCLISDFYPGAVTVAWKADSSPVKAGVETTTPSKQSNNKYAASSYLSLTPEQWKSHRSYSCQVTHEGSTVEKTVAPTECS

SEQ ID NO: 441 - protein, 216 aa, synthetic construct
  REGION 1..216: note = Description of Artificial Sequence: Synthetic polypeptide
QSVLTQPPSASGTPGQRVTISCSGSSSNIGSNYVNWYQHLPGTAPKLLIYTNNQRPSGVPDRFSGSKSGTSASLAISGLQSEDEADYFCATFDESLQGPVFGGGTKLTVLGQPKAAPSVTLFPPSSEELQANKATLVCLISDFYPGAVTVAWKADSSPVKAGVETTTPSKQSNNKYAASSYLSLTPEQWKSHRSYSCQVTHEGSTVEKTVAPTECS

SEQ ID NO: 442 - protein, 216 aa, synthetic construct
  REGION 1..216: note = Description of Artificial Sequence: Synthetic polypeptide
QSVLTQPPSASGTPGQRVTISCSGSSSNIGSQTVNWYQHLPGTAPKLLIYTNNQRPSGVPDRFSGSKSGTSASLAISGLQSEDEADYFCATFDDSLNGPVFGGGTKLTVLGQPKAAPSVTLFPPSSEELQANKATLVCLISDFYPGAVTVAWKADSSPVKAGVETTTPSKQSNNKYAASSYLSLTPEQWKSHRSYSCQVTHEGSTVEKTVAPTECS

SEQ ID NO: 443 - protein, 216 aa, synthetic construct
  REGION 1..216: note = Description of Artificial Sequence: Synthetic polypeptide
QSVLTQPPSASGTPGQRVTISCSGSSSNIGSNYVNWYQHLPGTAPKLLIYTNNQRPSGVPDRFSGSKSGTSASLAISGLQSEDEADYFCATFDDSLNGPVFGGGTKLTVLGQPKAAPSVTLFPPSSEELQANKATLVCLISDFYPGAVTVAWKADSSPVKAGVETTTPSKQSNNKYAASSYLSLTPEQWKSHRSYSCQVTHEGSTVEKTVAPTECS

SEQ ID NO: 444 - protein, 216 aa, synthetic construct
  REGION 1..216: note = Description of Artificial Sequence: Synthetic polypeptide
QSVLTQPPSASGTPGQRVTISCSGSSSNIGSNTVNWYQHLPGTAPKLLIYTNNQRPSGVPDRFSGSKSGTSASLAISGLQSEDEADYFCATFDESLNGPVFGGGTKLTVLGQPKAAPSVTLFPPSSEELQANKATLVCLISDFYPGAVTVAWKADSSPVKAGVETTTPSKQSNNKYAASSYLSLTPEQWKSHRSYSCQVTHEGSTVEKTVAPTECS

SEQ ID NO: 445 - protein, 216 aa, synthetic construct
  REGION 1..216: note = Description of Artificial Sequence: Synthetic polypeptide
QSVLTQPPSASGTPGQRVTISCSGSSSNIGSNTVNWYQHLPGTAPKLLIYTNNQRPSGVPDRFSGSKSGTSASLAISGLQSEDEADYFCATFDDSLQGPVFGGGTKLTVLGQPKAAPSVTLFPPSSEELQANKATLVCLISDFYPGAVTVAWKADSSPVKAGVETTTPSKQSNNKYAASSYLSLTPEQWKSHRSYSCQVTHEGSTVEKTVAPTECS

SEQ ID NO: 446 - protein, 216 aa, synthetic construct
  REGION 1..216: note = Description of Artificial Sequence: Synthetic polypeptide
QSVLTQPPSASGTPGQRVTISCSGSSSNIGSNTVNWYQHLPGTAPKLLIYTNNQRPSGVPDRFSGSKSGTSASLAISGLQSEDEADYFCATFDDSLSGPVFGGGTKLTVLGQPKAAPSVTLFPPSSEELQANKATLVCLISDFYPGAVTVAWKADSSPVKAGVETTTPSKQSNNKYAASSYLSLTPEQWKSHRSYSCQVTHEGSTVEKTVAPTECS

SEQ ID NO: 447 - protein, 216 aa, synthetic construct
  REGION 1..216: note = Description of Artificial Sequence: Synthetic polypeptide
QSVLTQPPSASGTPGQRVTISCSGSSSNIGSNTVNWYQHLPGTAPKLLIYTNNQRPSGVPDRFSGSKSGTSASLAISGLQSEDEADYFCATFDDSLNAPVFGGGTKLTVLGQPKAAPSVTLFPPSSEELQANKATLVCLISDFYPGAVTVAWKADSSPVKAGVETTTPSKQSNNKYAASSYLSLTPEQWKSHRSYSCQVTHEGSTVEKTVAPTECS

SEQ ID NO: 448 - protein, 216 aa, synthetic construct
  REGION 1..216: note = Description of Artificial Sequence: Synthetic polypeptide
QSVLTQPPSASGTPGQRVTISCSGSSSNIGSNTVNWYQHLPGTAPKLLIYTNNQRPSGVPDRFSGSKSGTSASLAISGLQSEDEADYFCATFDSSLNGPVFGGGTKLTVLGQPKAAPSVTLFPPSSEELQANKATLVCLISDFYPGAVTVAWKADSSPVKAGVETTTPSKQSNNKYAASSYLSLTPEQWKSHRSYSCQVTHEGSTVEKTVAPTECS

SEQ ID NO: 449 - protein, 216 aa, synthetic construct
  REGION 1..216: note = Description of Artificial Sequence: Synthetic polypeptide
QSVLTQPPSASGTPGQRVTISCSGSSSNIGSNYVNWYQHLPGTAPKLLIYTNNQRPSGVPDRFSGSKSGTSASLAISGLQSEDEADYFCATFDSSLNAPVFGGGTKLTVLGQPKAAPSVTLFPPSSEELQANKATLVCLISDFYPGAVTVAWKADSSPVKAGVETTTPSKQSNNKYAASSYLSLTPEQWKSHRSYSCQVTHEGSTVEKTVAPTECS

SEQ ID NO: 450 - protein, 216 aa, synthetic construct; identical to SEQ ID NO: 449
  REGION 1..216: note = Description of Artificial Sequence: Synthetic polypeptide

SEQ ID NO: 451 - protein, 216 aa, synthetic construct; identical to SEQ ID NO: 438
  REGION 1..216: note = Description of Artificial Sequence: Synthetic polypeptide

SEQ ID NO: 452 - protein, 214 aa, synthetic construct
  REGION 1..214: note = Description of Artificial Sequence: Synthetic polypeptide
DIQMTQSPSSLSASIGDRVTITCRASQDLRNYLGWYQQKPGKAPKRLIYGASSLQSGVPSRFSGSGSGTEFTLTISSLQPEDFATYYCLQHNNYPFTFGQGTKVDIKRTVAAPSVFIFPPSDEQLKSGTASVVCLLNNFYPREAKVQWKVDNALQSGNSQESVTEQDSKDSTYSLSSTLTLSKADYEKHKVYACEVTHQGLSSPVTKSFNRGEC

SEQ ID NO: 453 - protein, 214 aa, synthetic construct; identical to SEQ ID NO: 336
  REGION 1..214: note = Description of Artificial Sequence: Synthetic polypeptide

SEQ ID NO: 454 - protein, 216 aa, synthetic construct
  REGION 1..216: note = Description of Artificial Sequence: Synthetic polypeptide
QSVLTQPPSASGTPGQRVTISCSGSSSNIGSNTVNWYQQLPGTAPKLLIYTNNQRPSGVPDRFSGSKSGTSASLAISGLQSEDEADYFCATFDSSLSGPVFGGGTKLTVLGQPKAAPSVTLFPPSSEELQANKATLVCLISDFYPGAVTVAWKADSSPVKAGVETTTPSKQSNNKYAASSYLSLTPEQWKSHRSYSCQVTHEGSTVEKTVAPTECS

SEQ ID NO: 455 - protein, 214 aa, synthetic construct
  REGION 1..214: note = Description of Artificial Sequence: Synthetic polypeptide
DIQLTQSPSSLSASVGDRVTITCRASQTISRFLNWYQQKPGKAPELLIYVASSLQSGVPSRFSGSGSGTDFTLTISSLQPEDFATYYCQQSYSTLISFGQGTKLEITRTVAAPSVFIFPPSDEQLKSGTASVVCLLNNFYPREAKVQWKVDNALQSGNSQESVTEQDSKDSTYSLSSTLTLSKADYEKHKVYACEVTHQGLSSPVTKSFNRGEC

SEQ ID NO: 456 - protein, 216 aa, synthetic construct
  REGION 1..216: note = Description of Artificial Sequence: Synthetic polypeptide
QSVLTQPPSVSAAPGQKVTISCSGSSSNIGNNYVSWYEQFPGTAPKLLIYDNNKRPSGIPDRFSGSKSGTSATLGITGLQTGDEADYYCGTWDSSLSAVVFGGGTKLTVLGQPKAAPSVTLFPPSSEELQANKATLVCLISDFYPGAVTVAWKADSSPVKAGVETTTPSKQSNNKYAASSYLSLTPEQWKSHRSYSCQVTHEGSTVEKTVAPTECS

SEQ ID NO: 457 - protein, 214 aa, synthetic construct
  REGION 1..214: note = Description of Artificial Sequence: Synthetic polypeptide
DIQLTQSPSSLSASVGDRVTITCRASQTISRFLNWYQQKPGKAPELLIYVASSLQSGVPSRFSGSGSGTDFTLTISSLQPEDFATYYCQQSYSTLISFGQGTKLEIKRTVAAPSVFIFPPSDEQLKSGTASVVCLLNNFYPREAKVQWKVDNALQSGNSQESVTEQDSKDSTYSLSSTLTLSKADYEKHKVYACEVTHQGLSSPVTKSFNRGEC

SEQ ID NO: 458 - protein, 214 aa, synthetic construct; identical to SEQ ID NO: 457
  REGION 1..214: note = Description of Artificial Sequence: Synthetic polypeptide

SEQ ID NO: 459 - protein, 214 aa, synthetic construct; identical to SEQ ID NO: 455
  REGION 1..214: note = Description of Artificial Sequence: Synthetic polypeptide

SEQ ID NO: 460 - protein, 214 aa, synthetic construct
  REGION 1..214: note = Description of Artificial Sequence: Synthetic polypeptide
DIQLTQSPSSLSASVGDRVTITCRASQTISRFLNWYQQKPGKAPKLLIYVASSLQSGVPSRFSGSGSGTDFTLTISSLQPEDFATYYCQQSYSTLISFGQGTKLEIKRTVAAPSVFIFPPSDEQLKSGTASVVCLLNNFYPREAKVQWKVDNALQSGNSQESVTEQDSKDSTYSLSSTLTLSKADYEKHKVYACEVTHQGLSSPVTKSFNRGEC

SEQ ID NO: 461 - protein, 214 aa, synthetic construct; identical to SEQ ID NO: 457
  REGION 1..214: note = Description of Artificial Sequence: Synthetic polypeptide

SEQ ID NO: 462 - protein, 214 aa, synthetic construct; identical to SEQ ID NO: 457
  REGION 1..214: note = Description of Artificial Sequence: Synthetic polypeptide

SEQ ID NO: 463 - protein, 216 aa, synthetic construct
  REGION 1..216: note = Description of Artificial Sequence: Synthetic polypeptide
QSVLTQPPSVSAAPGQKVTISCSGSSSNIGNNYVSWYQQLPGTAPKLLIYDNNKRPSGIPDRFSGSKSGTSATLGITGLQTGDEADYYCGTWDSSLSAVVFGGGTKLTVLGQPKAAPSVTLFPPSSEELQANKATLVCLISDFYPGAVTVAWKADSSPVKAGVETTTPSKQSNNKYAASSYLSLTPEQWKSHRSYSCQVTHEGSTVEKTVAPTECS

SEQ ID NO: 464 - protein, 216 aa, synthetic construct; identical to SEQ ID NO: 463
  REGION 1..216: note = Description of Artificial Sequence: Synthetic polypeptide

SEQ ID NO: 465 - protein, 216 aa, synthetic construct; identical to SEQ ID NO: 456
  REGION 1..216: note = Description of Artificial Sequence: Synthetic polypeptide

SEQ ID NO: 466 - protein, 216 aa, synthetic construct
  REGION 1..216: note = Description of Artificial Sequence: Synthetic polypeptide
QSVLTQPPSVSAAPGQKVTISCSGSSSNIGNNYVSWYQQLPGTAPKLLIYDNNKRPSGIPDRFSGSKSGTSATLAITGLQTGDEADYYCGTFESSLSAVVFGGGTKLTVLGQPKAAPSVTLFPPSSEELQANKATLVCLISDFYPGAVTVAWKADSSPVKAGVETTTPSKQSNNKYAASSYLSLTPEQWKSHRSYSCQVTHEGSTVEKTVAPTECS

SEQ ID NO: 467 - protein, 216 aa, synthetic construct
  REGION 1..216: note = Description of Artificial Sequence: Synthetic polypeptide
QSVLTQPPSVSAAPGQKVTISCSGSSSNIGNNYVSWYQQLPGTAPKLLIYDNNKRPSGIPDRFSGSKSGTSATLAITGLQTGDEADYYCGTWDSSLSAVVFGGGTKLTVLGQPKAAPSVTLFPPSSEELQANKATLVCLISDFYPGAVTVAWKADSSPVKAGVETTTPSKQSNNKYAASSYLSLTPEQWKSHRSYSCQVTHEGSTVEKTVAPTECS

SEQ ID NO: 468 - protein, 216 aa, synthetic construct; identical to SEQ ID NO: 467
  REGION 1..216: note = Description of Artificial Sequence: Synthetic polypeptide

SEQ ID NO: 469 - protein, 216 aa, synthetic construct; identical to SEQ ID NO: 463
  REGION 1..216: note = Description of Artificial Sequence: Synthetic polypeptide

SEQ ID NO: 470 - protein, 216 aa, synthetic construct; identical to SEQ ID NO: 466
  REGION 1..216: note = Description of Artificial Sequence: Synthetic polypeptide

SEQ ID NO: 471 - protein, 214 aa, synthetic construct
  REGION 1..214: note = Description of Artificial Sequence: Synthetic polypeptide
DIQLTQSPSSLSASVGDRVTITCRASQTISRFLNWYQQKPGKAPKLLIYVASSLQSGVPSRFSGSGSGTDFTLTISSLQPEDFATYYCQQSYSTLLSFGQGTKLEIKRTVAAPSVFIFPPSDEQLKSGTASVVCLLNNFYPREAKVQWKVDNALQSGNSQESVTEQDSKDSTYSLSSTLTLSKADYEKHKVYACEVTHQGLSSPVTKSFNRGEC

SEQ ID NO: 472 - protein, 458 aa, synthetic construct
  REGION 1..458: note = Description of Artificial Sequence: Synthetic polypeptide
QMQVVQSGAEVKKPGASVKVSCKASGYTFTGYYMHWVRQAPGQGLEWMGWINPNSGGTNYAQKFQGRVTMTRDTSISTAYMELSRLRSDDTAVYYCARGGDYVWGTYRPHYYYGMDVWGQGTTVTVSSASTKGPSVFPLAPSSKSTSGGTAALGCLVKDYFPEPVTVSWNSGALTSGVHTFPAVLQSSGLYSLSSVVTVPSSSLGTQTYICNVNHKPSNTKVDKKVEPKSCDKTHTCPPCPAPELLGGPSVFLFPPKPKDTLMISRTPEVTCVVVDVSHEDPEVKFNWYVDGVEVHNAKTKPCEEQYGSTYRCVSVLTVLHQDWLNGKEYKCKVSNKALPAPIEKTISKAKGQPREPQVYTLPPSREEMTKNQVSLTCLVKGFYPSDIAVEWESNGQPENNYKTTPPVLDSDGSFFLYSKLTVDKSRWQQGNVFSCSVMHEALHNHYTQKSLSLSPGK

SEQ ID NO: 473 - protein, 451 aa, synthetic construct
  REGION 1..451: note = Description of Artificial Sequence: Synthetic polypeptide
QVQLVESGGGVVQPGRSLRLSCAASGFTFSNFGMHWVRQAPGKGLEWVAVIWYDGSNENYADSVKGRFTISRDNSKNTLYLHMNSLRVADTAVYYCARDGTIFGVVLGDYWGQGTLVTVSSASTKGPSVFPLAPSSKSTSGGTAALGCLVKDYFPEPVTVSWNSGALTSGVHTFPAVLQSSGLYSLSSVVTVPSSSLGTQTYICNVNHKPSNTKVDKKVEPKSCDKTHTCPPCPAPELLGGPSVFLFPPKPKDTLMISRTPEVTCVVVDVSHEDPEVKFNWYVDGVEVHNAKTKPCEEQYGSTYRCVSVLTVLHQDWLNGKEYKCKVSNKALPAPIEKTISKAKGQPREPQVYTLPPSREEMTKNQVSLTCLVKGFYPSDIAVEWESNGQPENNYKTTPPVLDSDGSFFLYSKLTVDKSRWQQGNVFSCSVMHEALHNHYTQKSLSLSPGK

SEQ ID NO: 474 - protein, 451 aa, synthetic construct
  REGION 1..451: note = Description of Artificial Sequence: Synthetic polypeptide
QVQLVESGGGVVQPGRSLRLSCAASGFTFSYFGMHWVRQAPGKGLEWVAVIWYDGSNKYYADSVKGRFTISRDNSKNTLYLQMNSLRAEDTAVYYCARDGTIFGVLLGDYWGQGTLVTVSSASTKGPSVFPLAPSSKSTSGGTAALGCLVKDYFPEPVTVSWNSGALTSGVHTFPAVLQSSGLYSLSSVVTVPSSSLGTQTYICNVNHKPSNTKVDKKVEPKSCDKTHTCPPCPAPELLGGPSVFLFPPKPKDTLMISRTPEVTCVVVDVSHEDPEVKFNWYVDGVEVHNAKTKPCEEQYGSTYRCVSVLTVLHQDWLNGKEYKCKVSNKALPAPIEKTISKAKGQPREPQVYTLPPSREEMTKNQVSLTCLVKGFYPSDIAVEWESNGQPENNYKTTPPVLDSDGSFFLYSKLTVDKSRWQQGNVFSCSVMHEALHNHYTQKSLSLSPGK

SEQ ID NO: 475 - protein, 450 aa, synthetic construct
  REGION 1..450: note = Description of Artificial Sequence: Synthetic polypeptide
QVQLVESGGGVVQPGRSLRLSCAASGFTFSSYGMHWVRQAPGKGLEWVAVIWYDGSNKYYADSVKGRFTISSDNSKNTLYLQMNSLRAEDTAVYYCARDRTIFGVVLDYWGQGTLVTVSSASTKGPSVFPLAPSSKSTSGGTAALGCLVKDYFPEPVTVSWNSGALTSGVHTFPAVLQSSGLYSLSSVVTVPSSSLGTQTYICNVNHKPSNTKVDKKVEPKSCDKTHTCPPCPAPELLGGPSVFLFPPKPKDTLMISRTPEVTCVVVDVSHEDPEVKFNWYVDGVEVHNAKTKPCEEQYGSTYRCVSVLTVLHQDWLNGKEYKCKVSNKALPAPIEKTISKAKGQPREPQVYTLPPSREEMTKNQVSLTCLVKGFYPSDIAVEWESNGQPENNYKTTPPVLDSDGSFFLYSKLTVDKSRWQQGNVFSCSVMHEALHNHYTQKSLSLSPGK

SEQ ID NO: 476 - protein, 453 aa, synthetic construct
  REGION 1..453: note = Description of Artificial Sequence: Synthetic polypeptide
QVPLVQSGAEVKKPGASVKVSCKASGYTFTGYYIHWVRQAPGQGLEWMGWINPDSGGTDYSQRFQGRFTMTRDTSISTAYMELNRLRSDDTAVYYCAREATIFGMVIVPFDYWGQGTLVTVSSASTKGPSVFPLAPSSKSTSGGTAALGCLVKDYFPEPVTVSWNSGALTSGVHTFPAVLQSSGLYSLSSVVTVPSSSLGTQTYICNVNHKPSNTKVDKKVEPKSCDKTHTCPPCPAPELLGGPSVFLFPPKPKDTLMISRTPEVTCVVVDVSHEDPEVKFNWYVDGVEVHNAKTKPCEEQYGSTYRCVSVLTVLHQDWLNGKEYKCKVSNKALPAPIEKTISKAKGQPREPQVYTLPPSREEMTKNQVSLTCLVKGFYPSDIAVEWESNGQPENNYKTTPPVLDSDGSFFLYSKLTVDKSRWQQGNVFSCSVMHEALHNHYTQKSLSLSPGK

SEQ ID NO: 477 - protein, 453 aa, synthetic construct
  REGION 1..453: note = Description of Artificial Sequence: Synthetic polypeptide
QVPLVQSGAEVKKPGASVKVSCKASGYTFTGYYIHWVRQAPGQGLEWMGWINPDSGGTDYSQRFQGRFTMTRDTSISTAYMELSRLRSDDTAVYYCAREATIFGMVIVPFDYWGQGTLVTVSSASTKGPSVFPLAPSSKSTSGGTAALGCLVKDYFPEPVTVSWNSGALTSGVHTFPAVLQSSGLYSLSSVVTVPSSSLGTQTYICNVNHKPSNTKVDKKVEPKSCDKTHTCPPCPAPELLGGPSVFLFPPKPKDTLMISRTPEVTCVVVDVSHEDPEVKFNWYVDGVEVHNAKTKPCEEQYGSTYRCVSVLTVLHQDWLNGKEYKCKVSNKALPAPIEKTISKAKGQPREPQVYTLPPSREEMTKNQVSLTCLVKGFYPSDIAVEWESNGQPENNYKTTPPVLDSDGSFFLYSKLTVDKSRWQQGNVFSCSVMHEALHNHYTQKSLSLSPGK

SEQ ID NO: 478 - protein, 453 aa, synthetic construct
  REGION 1..453: note = Description of Artificial Sequence: Synthetic polypeptide
QVPLVQSGAEVKKPGASVKVSCKASGYTFTGYYIHWVRQAPGQGLVWMGWISPNSGDTSYAQKFQDRVTMTRDTSISTAYMELSRLRSDDTAVYFCTREATIFGMLIVPFDYWGQGTLVTVSSASTKGPSVFPLAPSSKSTSGGTAALGCLVKDYFPEPVTVSWNSGALTSGVHTFPAVLQSSGLYSLSSVVTVPSSSLGTQTYICNVNHKPSNTKVDKKVEPKSCDKTHTCPPCPAPELLGGPSVFLFPPKPKDTLMISRTPEVTCVVVDVSHEDPEVKFNWYVDGVEVHNAKTKPCEEQYGSTYRCVSVLTVLHQDWLNGKEYKCKVSNKALPAPIEKTISKAKGQPREPQVYTLPPSREEMTKNQVSLTCLVKGFYPSDIAVEWESNGQPENNYKTTPPVLDSDGSFFLYSKLTVDKSRWQQGNVFSCSVMHEALHNHYTQKSLSLSPGK

SEQ ID NO: 479 - protein, 453 aa, synthetic construct
  REGION 1..453: note = Description of Artificial Sequence: Synthetic polypeptide
QVPLVQSGAEVKKPGASVKVSCKASGYTFTGYYIHWVRQAPGQGLEWMGWISPNNGDTNYAQKFQDRVTMTRDTSISTAYMELSRLRSDDTAVYYCTREATIFGMLIVPFDYWGQGTLVTVSSASTKGPSVFPLAPSSKSTSGGTAALGCLVKDYFPEPVTVSWNSGALTSGVHTFPAVLQSSGLYSLSSVVTVPSSSLGTQTYICNVNHKPSNTKVDKKVEPKSCDKTHTCPPCPAPELLGGPSVFLFPPKPKDTLMISRTPEVTCVVVDVSHEDPEVKFNWYVDGVEVHNAKTKPCEEQYGSTYRCVSVLTVLHQDWLNGKEYKCKVSNKALPAPIEKTISKAKGQPREPQVYTLPPSREEMTKNQVSLTCLVKGFYPSDIAVEWESNGQPENNYKTTPPVLDSDGSFFLYSKLTVDKSRWQQGNVFSCSVMHEALHNHYTQKSLSLSPGK

SEQ ID NO: 480 - protein, 456 aa, synthetic construct
  REGION 1..456: note = Description of Artificial Sequence: Synthetic polypeptide
QVQLQESGPGLVKPSQTLSLTCTVSGDSISSGGYYWSWIRQHPGKGLEWIGYIYYSGSTYYNPSLKSRVTISVDTSKNQFSLKLSSVTAADTAVYYCARDRITIFGVVMGGGMDVWGQGTTVTVSSASTKGPSVFPLAPSSKSTSGGTAALGCLVKDYFPEPVTVSWNSGALTSGVHTFPAVLQSSGLYSLSSVVTVPSSSLGTQTYICNVNHKPSNTKVDKKVEPKSCDKTHTCPPCPAPELLGGPSVFLFPPKPKDTLMISRTPEVTCVVVDVSHEDPEVKFNWYVDGVEVHNAKTKPCEEQYGSTYRCVSVLTVLHQDWLNGKEYKCKVSNKALPAPIEKTISKAKGQPREPQVYTLPPSREEMTKNQVSLTCLVKGFYPSDIAVEWESNGQPENNYKTTPPVLDSDGSFFLYSKLTVDKSRWQQGNVFSCSVMHEALHNHYTQKSLSLSPGK

SEQ ID NO: 481 - protein, 450 aa, synthetic construct
  REGION 1..450: note = Description of Artificial Sequence: Synthetic polypeptide
QVQLVESGGGVVQPGRSLRLSCAASGFTFSNYGMHWVRQAPGEGLEWVAAIWFDGSDKYYADSVKGRFTISRDNSKNTLYLQMNSLRAEDTAVYYCARDQAIFGVVPDYWGQGTLVTVSSASTKGPSVFPLAPSSKSTSGGTAALGCLVKDYFPEPVTVSWNSGALTSGVHTFPAVLQSSGLYSLSSVVTVPSSSLGTQTYICNVNHKPSNTKVDKKVEPKSCDKTHTCPPCPAPELLGGPSVFLFPPKPKDTLMISRTPEVTCVVVDVSHEDPEVKFNWYVDGVEVHNAKTKPCEEQYGSTYRCVSVLTVLHQDWLNGKEYKCKVSNKALPAPIEKTISKAKGQPREPQVYTLPPSREEMTKNQVSLTCLVKGFYPSDIAVEWESNGQPENNYKTTPPVLDSDGSFFLYSKLTVDKSRWQQGNVFSCSVMHEALHNHYTQKSLSLSPGK

SEQ ID NO: 482 - protein, 451 aa, synthetic construct; identical to SEQ ID NO: 474
  REGION 1..451: note = Description of Artificial Sequence: Synthetic polypeptide

SEQ ID NO: 483 - protein, 450 aa, synthetic construct
  REGION 1..450: note = Description of Artificial Sequence: Synthetic polypeptide
QVQLVESGGGVVQPGRSLRLSCAASGFSFSSYGMHWVRQPPGKGLEWVAAIWYDGNNKYYADSVKGRFTISRDSSKNTLYLQMNSLRAEDTAVYYCARDRTIFGVVLEYLGQGTLVTVSSASTKGPSVFPLAPSSKSTSGGTAALGCLVKDYFPEPVTVSWNSGALTSGVHTFPAVLQSSGLYSLSSVVTVPSSSLGTQTYICNVNHKPSNTKVDKKVEPKSCDKTHTCPPCPAPELLGGPSVFLFPPKPKDTLMISRTPEVTCVVVDVSHEDPEVKFNWYVDGVEVHNAKTKPCEEQYGSTYRCVSVLTVLHQDWLNGKEYKCKVSNKALPAPIEKTISKAKGQPREPQVYTLPPSREEMTKNQVSLTCLVKGFYPSDIAVEWESNGQPENNYKTTPPVLDSDGSFFLYSKLTVDKSRWQQGNVFSCSVMHEALHNHYTQKSLSLSPGK

SEQ ID NO: 484 - protein, 447 aa, synthetic construct
  REGION 1..447: note = Description of Artificial Sequence: Synthetic polypeptide
QVQLQESGPGLVKPSETLSLTCTVSQGSISSYYWSWIRQPAGKGLEWIGRIYTSGSTNYNPSLKSRVTMSIDTSKNQFSLKLNSVTAADTAVYYCARDVAVAGFDYWGQGTLVTVSSASTKGPSVFPLAPSSKSTSGGTAALGCLVKDYFPEPVTVSWNSGALTSGVHTFPAVLQSSGLYSLSSVVTVPSSSLGTQTYICNVNHKPSNTKVDKKVEPKSCDKTHTCPPCPAPELLGGPSVFLFPPKPKDTLMISRTPEVTCVVVDVSHEDPEVKFNWYVDGVEVHNAKTKPCEEQYGSTYRCVSVLTVLHQDWLNGKEYKCKVSNKALPAPIEKTISKAKGQPREPQVYTLPPSREEMTKNQVSLTCLVKGFYPSDIAVEWESNGQPENNYKTTPPVLDSDGSFFLYSKLTVDKSRWQQGNVFSCSVMHEALHNHYTQKSLSLSPGK

SEQ ID NO: 485 - protein, 447 aa, synthetic construct
  REGION 1..447: note = Description of Artificial Sequence: Synthetic polypeptide
QVQLQESGPGLVKPSETLSLTCTVSGGSISSYYWSWIRQPAGKGLEWIGRIYTSGSTNYNPSLKSRVTMSIDTSKNQFSLKLNSVTAADTAVYYCARDVAVAGFDYWGQGTLVTVSSASTKGPSVFPLAPSSKSTSGGTAALGCLVKDYFPEPVTVSWNSGALTSGVHTFPAVLQSSGLYSLSSVVTVPSSSLGTQTYICNVNHKPSNTKVDKKVEPKSCDKTHTCPPCPAPELLGGPSVFLFPPKPKDTLMISRTPEVTCVVVDVSHEDPEVKFNWYVDGVEVHNAKTKPCEEQYGSTYRCVSVLTVLHQDWLNGKEYKCKVSNKALPAPIEKTISKAKGQPREPQVYTLPPSREEMTKNQVSLTCLVKGFYPSDIAVEWESNGQPENNYKTTPPVLDSDGSFFLYSKLTVDKSRWQQGNVFSCSVMHEALHNHYTQKSLSLSPGK

SEQ ID NO: 486 - protein, 451 aa, synthetic construct
  REGION 1..451: note = Description of Artificial Sequence: Synthetic polypeptide
QVQLVESGGGVVQPGRSLRLSCAASGFTFSYFGMHWVRQAPGKGLEWVAVIWYDASNKYYADAVKGRFTISRDNSKNTLYLQMNSLRAEDTAVYYCARDGTIFGVLLGDYWGQGTLVTVSSASTKGPSVFPLAPSSKSTSGGTAALGCLVKDYFPEPVTVSWNSGALTSGVHTFPAVLQSSGLYSLSSVVTVPSSSLGTQTYICNVNHKPSNTKVDKKVEPKSCDKTHTCPPCPAPELLGGPSVFLFPPKPKDTLMISRTPEVTCVVVDVSHEDPEVKFNWYVDGVEVHNAKTKPCEEQYGSTYRCVSVLTVLHQDWLNGKEYKCKVSNKALPAPIEKTISKAKGQPREPQVYTLPPSREEMTKNQVSLTCLVKGFYPSDIAVEWESNGQPENNYKTTPPVLDSDGSFFLYSKLTVDKSRWQQGNVFSCSVMHEALHNHYTQKSLSLSPGK

SEQ ID NO: 487 - protein, 451 aa, synthetic construct
  REGION 1..451: note = Description of Artificial Sequence: Synthetic polypeptide
QVQLVESGGGVVQPGRSLRLSCAASGFTFSYFGMHWVRQAPGKGLEWVAVIWYDASNKYYADSVKGRFTISRDNSKNTLYLQMNSLRAEDTAVYYCARDGTIFGVLLGDYWGQGTLVTVSSASTKGPSVFPLAPSSKSTSGGTAALGCLVKDYFPEPVTVSWNSGALTSGVHTFPAVLQSSGLYSLSSVVTVPSSSLGTQTYICNVNHKPSNTKVDKKVEPKSCDKTHTCPPCPAPELLGGPSVFLFPPKPKDTLMISRTPEVTCVVVDVSHEDPEVKFNWYVDGVEVHNAKTKPCEEQYGSTYRCVSVLTVLHQDWLNGKEYKCKVSNKALPAPIEKTISKAKGQPREPQVYTLPPSREEMTKNQVSLTCLVKGFYPSDIAVEWESNGQPENNYKTTPPVLDSDGSFFLYSKLTVDKSRWQQGNVFSCSVMHEALHNHYTQKSLSLSPGK

SEQ ID NO: 488 - protein, 451 aa, synthetic construct
  REGION 1..451: note = Description of Artificial Sequence: Synthetic polypeptide
QVQLVESGGGVVQPGRSLRLSCAASGFTFSYFGMHWVRQAPGKGLEWVAVIWYDGSNKYYADAVKGRFTISRDNSKNTLYLQMNSLRAEDTAVYYCARDGTIFGVLLGDYWGQGTLVTVSSASTKGPSVFPLAPSSKSTSGGTAALGCLVKDYFPEPVTVSWNSGALTSGVHTFPAVLQSSGLYSLSSVVTVPSSSLGTQTYICNVNHKPSNTKVDKKVEPKSCDKTHTCPPCPAPELLGGPSVFLFPPKPKDTLMISRTPEVTCVVVDVSHEDPEVKFNWYVDGVEVHNAKTKPCEEQYGSTYRCVSVLTVLHQDWLNGKEYKCKVSNKALPAPIEKTISKAKGQPREPQVYTLPPSREEMTKNQVSLTCLVKGFYPSDIAVEWESNGQPENNYKTTPPVLDSDGSFFLYSKLTVDKSRWQQGNVFSCSVMHEALHNHYTQKSLSLSPGK

SEQ ID NO: 489 - protein, 451 aa, synthetic construct; identical to SEQ ID NO: 486
  REGION 1..451: note = Description of Artificial Sequence: Synthetic polypeptide

SEQ ID NO: 490 - protein, 451 aa, synthetic construct; identical to SEQ ID NO: 486
  REGION 1..451: note = Description of Artificial Sequence: Synthetic polypeptide

SEQ ID NO: 491 - protein, 451 aa, synthetic construct
  REGION 1..451: note = Description of Artificial Sequence: Synthetic polypeptide
QVQLVESGGGVVQPGRSLRLSCAASGFTFSYFGMHWVRQAPGKGLEWVAVIWYDASNKYYADAVKGRFTISRDNSKNTLYLQMNSLRAEDTAVYYCARDRTIFGVLLGDYWGQGTLVTVSSASTKGPSVFPLAPSSKSTSGGTAALGCLVKDYFPEPVTVSWNSGALTSGVHTFPAVLQSSGLYSLSSVVTVPSSSLGTQTYICNVNHKPSNTKVDKKVEPKSCDKTHTCPPCPAPELLGGPSVFLFPPKPKDTLMISRTPEVTCVVVDVSHEDPEVKFNWYVDGVEVHNAKTKPCEEQYGSTYRCVSVLTVLHQDWLNGKEYKCKVSNKALPAPIEKTISKAKGQPREPQVYTLPPSREEMTKNQVSLTCLVKGFYPSDIAVEWESNGQPENNYKTTPPVLDSDGSFFLYSKLTVDKSRWQQGNVFSCSVMHEALHNHYTQKSLSLSPGK

SEQ ID NO: 492 - protein, 451 aa, synthetic construct
  REGION 1..451: note = Description of Artificial Sequence: Synthetic polypeptide
QVQLVESGGGVVQPGRSLRLSCAASGFTFSNFGMHWVRQAPGKGLEWVAVIWYDASNENYADAVKGRFTISRDNSKNTLYLQMNSLRVADTAVYYCARDGTIFGVVLGDYWGQGTLVTVSSASTKGPSVFPLAPSSKSTSGGTAALGCLVKDYFPEPVTVSWNSGALTSGVHTFPAVLQSSGLYSLSSVVTVPSSSLGTQTYICNVNHKPSNTKVDKKVEPKSCDKTHTCPPCPAPELLGGPSVFLFPPKPKDTLMISRTPEVTCVVVDVSHEDPEVKFNWYVDGVEVHNAKTKPCEEQYGSTYRCVSVLTVLHQDWLNGKEYKCKVSNKALPAPIEKTISKAKGQPREPQVYTLPPSREEMTKNQVSLTCLVKGFYPSDIAVEWESNGQPENNYKTTPPVLDSDGSFFLYSKLTVDKSRWQQGNVFSCSVMHEALHNHYTQKSLSLSPGK

SEQ ID NO: 493 - protein, 451 aa, synthetic construct; identical to SEQ ID NO: 492
  REGION 1..451: note = Description of Artificial Sequence: Synthetic polypeptide

SEQ ID NO: 494 - protein, 451 aa, synthetic construct; identical to SEQ ID NO: 492
  REGION 1..451: note = Description of Artificial Sequence: Synthetic polypeptide

SEQ ID NO: 495 - protein, 451 aa, synthetic construct
  REGION 1..451: note = Description of Artificial Sequence: Synthetic polypeptide
QVQLVESGGGVVQPGRSLRLSCAASGFTFSNFGMHWVRQAPGKGLEWVAVIWYDASNENYADSVKGRFTISRDNSKNTLYLHMNSLRVADTAVYYCARDGTIFGVVLGDYWGQGTLVTVSSASTKGPSVFPLAPSSKSTSGGTAALGCLVKDYFPEPVTVSWNSGALTSGVHTFPAVLQSSGLYSLSSVVTVPSSSLGTQTYICNVNHKPSNTKVDKKVEPKSCDKTHTCPPCPAPELLGGPSVFLFPPKPKDTLMISRTPEVTCVVVDVSHEDPEVKFNWYVDGVEVHNAKTKPCEEQYGSTYRCVSVLTVLHQDWLNGKEYKCKVSNKALPAPIEKTISKAKGQPREPQVYTLPPSREEMTKNQVSLTCLVKGFYPSDIAVEWESNGQPENNYKTTPPVLDSDGSFFLYSKLTVDKSRWQQGNVFSCSVMHEALHNHYTQKSLSLSPGK

SEQ ID NO: 496 - protein, 451 aa, synthetic construct
  REGION 1..451: note = Description of Artificial Sequence: Synthetic polypeptide
QVQLVESGGGVVQPGRSLRLSCAASGFTFSNFGMHWVRQAPGKGLEWVAVIWYDGSNENYADAVKGRFTISRDNSKNTLYLHMNSLRVADTAVYYCARDGTIFGVVLGDYWGQGTLVTVSSASTKGPSVFPLAPSSKSTSGGTAALGCLVKDYFPEPVTVSWNSGALTSGVHTFPAVLQSSGLYSLSSVVTVPSSSLGTQTYICNVNHKPSNTKVDKKVEPKSCDKTHTCPPCPAPELLGGPSVFLFPPKPKDTLMISRTPEVTCVVVDVSHEDPEVKFNWYVDGVEVHNAKTKPCEEQYGSTYRCVSVLTVLHQDWLNGKEYKCKVSNKALPAPIEKTISKAKGQPREPQVYTLPPSREEMTKNQVSLTCLVKGFYPSDIAVEWESNGQPENNYKTTPPVLDSDGSFFLYSKLTVDKSRWQQGNVFSCSVMHEALHNHYTQKSLSLSPGK

SEQ ID NO: 497 - protein, 451 aa, synthetic construct
  REGION 1..451: note = Description of Artificial Sequence: Synthetic polypeptide
QVQLVESGGGVVQPGRSLRLSCAASGFTFSNFGMHWVRQAPGKGLEWVAVIWYDASNENYADAVKGRFTISRDNSKNTLYLQMNSLRVEDTAVYYCARDRTIFGVVLGDYWGQGTLVTVSSASTKGPSVFPLAPSSKSTSGGTAALGCLVKDYFPEPVTVSWNSGALTSGVHTFPAVLQSSGLYSLSSVVTVPSSSLGTQTYICNVNHKPSNTKVDKKVEPKSCDKTHTCPPCPAPELLGGPSVFLFPPKPKDTLMISRTPEVTCVVVDVSHEDPEVKFNWYVDGVEVHNAKTKPCEEQYGSTYRCVSVLTVLHQDWLNGKEYKCKVSNKALPAPIEKTISKAKGQPREPQVYTLPPSREEMTKNQVSLTCLVKGFYPSDIAVEWESNGQPENNYKTTPPVLDSDGSFFLYSKLTVDKSRWQQGNVFSCSVMHEALHNHYTQKSLSLSPGK

SEQ ID NO: 498 - protein, 451 aa, synthetic construct
  REGION 1..451: note = Description of Artificial Sequence: Synthetic polypeptide
QVQLVESGGGVVQPGRSLRLSCAASGFTFSNFGMHWVRQAPGKGLEWVAVIWYDASNENYADAVKGRFTISRDNSKNTLYLQMNSLRVEDTAVYYCARDGTIFGVVLGDYWGQGTLVTVSSASTKGPSVFPLAPSSKSTSGGTAALGCLVKDYFPEPVTVSWNSGALTSGVHTFPAVLQSSGLYSLSSVVTVPSSSLGTQTYICNVNHKPSNTKVDKKVEPKSCDKTHTCPPCPAPELLGGPSVFLFPPKPKDTLMISRTPEVTCVVVDVSHEDPEVKFNWYVDGVEVHNAKTKPCEEQYGSTYRCVSVLTVLHQDWLNGKEYKCKVSNKALPAPIEKTISKAKGQPREPQVYTLPPSREEMTKNQVSLTCLVKGFYPSDIAVEWESNGQPENNYKTTPPVLDSDGSFFLYSKLTVDKSRWQQGNVFSCSVMHEALHNHYTQKSLSLSPGK

SEQ ID NO: 499 - protein, 451 aa, synthetic construct
  REGION 1..451: note = Description of Artificial Sequence: Synthetic polypeptide
QVQLVESGGGVVQPGRSLRLSCAASGFTFSNFGMHWVRQAPGKGLEWVAVIWYDGSNENYADSVKGRFTISRDNSKNTLYLHMNSLRAADTAVYYCARDGTIFGVVLGDYWGQGTLVTVSSASTKGPSVFPLAPSSKSTSGGTAALGCLVKDYFPEPVTVSWNSGALTSGVHTFPAVLQSSGLYSLSSVVTVPSSSLGTQTYICNVNHKPSNTKVDKKVEPKSCDKTHTCPPCPAPELLGGPSVFLFPPKPKDTLMISRTPEVTCVVVDVSHEDPEVKFNWYVDGVEVHNAKTKPCEEQYGSTYRCVSVLTVLHQDWLNGKEYKCKVSNKALPAPIEKTISKAKGQPREPQVYTLPPSREEMTKNQVSLTCLVKGFYPSDIAVEWESNGQPENNYKTTPPVLDSDGSFFLYSKLTVDKSRWQQGNVFSCSVMHEALHNHYTQKSLSLSPGK

SEQ ID NO: 500 - protein, 451 aa, synthetic construct
  REGION 1..451: note = Description of Artificial Sequence: Synthetic polypeptide
QVQLVESGGGVVQPGRSLRLSCAASGFTFSNFGMHWVRQAPGKGLEWVAVIWYDASNENYADAVKGRFTISRDNSKNTLYLQMNSLRAADTAVYYCARDGTIFGVVLGDYWGQGTLVTVSSASTKGPSVFPLAPSSKSTSGGTAALGCLVKDYFPEPVTVSWNSGALTSGVHTFPAVLQSSGLYSLSSVVTVPSSSLGTQTYICNVNHKPSNTKVDKKVEPKSCDKTHTCPPCPAPELLGGPSVFLFPPKPKDTLMISRTPEVTCVVVDVSHEDPEVKFNWYVDGVEVHNAKTKPCEEQYGSTYRCVSVLTVLHQDWLNGKEYKCKVSNKALPAPIEKTISKAKGQPREPQVYTLPPSREEMTKNQVSLTCLVKGFYPSDIAVEWESNGQPENNYKTTPPVLDSDGSFFLYSKLTVDKSRWQQGNVFSCSVMHEALHNHYTQKSLSLSPGK

SEQ ID NO: 501 - protein, 451 aa, synthetic construct
  REGION 1..451: note = Description of Artificial Sequence: Synthetic polypeptide
QVQLVESGGGVVQPGRSLRLSCAASGFTFSNFGMHWVRQAPGKGLEWVAVIWYDASNENYADAVKGRFTISRDNSKNTLYLHMNSLRAADTAVYYCARDGTIFGVVLGDYWGQGTLVTVSSASTKGPSVFPLAPSSKSTSGGTAALGCLVKDYFPEPVTVSWNSGALTSGVHTFPAVLQSSGLYSLSSVVTVPSSSLGTQTYICNVNHKPSNTKVDKKVEPKSCDKTHTCPPCPAPELLGGPSVFLFPPKPKDTLMISRTPEVTCVVVDVSHEDPEVKFNWYVDGVEVHNAKTKPCEEQYGSTYRCVSVLTVLHQDWLNGKEYKCKVSNKALPAPIEKTISKAKGQPREPQVYTLPPSREEMTKNQVSLTCLVKGFYPSDIAVEWESNGQPENNYKTTPPVLDSDGSFFLYSKLTVDKSRWQQGNVFSCSVMHEALHNHYTQKSLSLSPGK

SEQ ID NO: 502 - protein, 451 aa, synthetic construct; identical to SEQ ID NO: 500
  REGION 1..451: note = Description of Artificial Sequence: Synthetic polypeptide

SEQ ID NO: 503 - protein, 451 aa, synthetic construct; identical to SEQ ID NO: 500
  REGION 1..451: note = Description of Artificial Sequence: Synthetic polypeptide

SEQ ID NO: 504 - protein, 451 aa, synthetic construct; identical to SEQ ID NO: 501
  REGION 1..451: note = Description of Artificial Sequence: Synthetic polypeptide

SEQ ID NO: 505 - protein, 451 aa, synthetic construct; identical to SEQ ID NO: 501
  REGION 1..451: note = Description of Artificial Sequence: Synthetic polypeptide

SEQ ID NO: 506 - protein, 451 aa, synthetic construct; identical to SEQ ID NO: 500
  REGION 1..451: note = Description of Artificial Sequence: Synthetic polypeptide

SEQ ID NO: 507 - protein, 451 aa, synthetic construct
  REGION 1..451: note = Description of Artificial Sequence: Synthetic polypeptide
QVQLVESGGGVVQPGRSLRLSCAASGFTFSNFGMHWVRQAPGKGLEWVAVIWYDGSNENYADAVKGRFTISRDNSKNTLYLQMNSLRAADTAVYYCARDGTIFGVVLGDYWGQGTLVTVSSASTKGPSVFPLAPSSKSTSGGTAALGCLVKDYFPEPVTVSWNSGALTSGVHTFPAVLQSSGLYSLSSVVTVPSSSLGTQTYICNVNHKPSNTKVDKKVEPKSCDKTHTCPPCPAPELLGGPSVFLFPPKPKDTLMISRTPEVTCVVVDVSHEDPEVKFNWYVDGVEVHNAKTKPCEEQYGSTYRCVSVLTVLHQDWLNGKEYKCKVSNKALPAPIEKTISKAKGQPREPQVYTLPPSREEMTKNQVSLTCLVKGFYPSDIAVEWESNGQPENNYKTTPPVLDSDGSFFLYSKLTVDKSRWQQGNVFSCSVMHEALHNHYTQKSLSLSPGK

SEQ ID NO: 508 - protein, 451 aa, synthetic construct
  REGION 1..451: note = Description of Artificial Sequence: Synthetic polypeptide
QVQLVESGGGVVQPGRSLRLSCAASGFTFSNFGMHWVRQAPGKGLEWVAVIWYDASNENYADSVKGRFTISRDNSKNTLYLQMNSLRAADTAVYYCARDGTIFGVVLGDYWGQGTLVTVSSASTKGPSVFPLAPSSKSTSGGTAALGCLVKDYFPEPVTVSWNSGALTSGVHTFPAVLQSSGLYSLSSVVTVPSSSLGTQTYICNVNHKPSNTKVDKKVEPKSCDKTHTCPPCPAPELLGGPSVFLFPPKPKDTLMISRTPEVTCVVVDVSHEDPEVKFNWYVDGVEVHNAKTKPCEEQYGSTYRCVSVLTVLHQDWLNGKEYKCKVSNKALPAPIEKTISKAKGQPREPQVYTLPPSREEMTKNQVSLTCLVKGFYPSDIAVEWESNGQPENNYKTTPPVLDSDGSFFLYSKLTVDKSRWQQGNVFSCSVMHEALHNHYTQKSLSLSPGK

SEQ ID NO: 509 - protein, 451 aa, synthetic construct
  REGION 1..451: note = Description of Artificial Sequence: Synthetic polypeptide
QVQLVESGGGVVQPGRSLRLSCAASGFTFSNFGMHWVRQAPGKGLEWVAVIWYDASNENYADAVKGRFTISRDNSKNTLYLQMNSLRAEDTAVYYCARDRTIFGVVLGDYWGQGTLVTVSSASTKGPSVFPLAPSSKSTSGGTAALGCLVKDYFPEPVTVSWNSGALTSGVHTFPAVLQSSGLYSLSSVVTVPSSSLGTQTYICNVNHKPSNTKVDKKVEPKSCDKTHTCPPCPAPELLGGPSVFLFPPKPKDTLMISRTPEVTCVVVDVSHEDPEVKFNWYVDGVEVHNAKTKPCEEQYGSTYRCVSVLTVLHQDWLNGKEYKCKVSNKALPAPIEKTISKAKGQPREPQVYTLPPSREEMTKNQVSLTCLVKGFYPSDIAVEWESNGQPENNYKTTPPVLDSDGSFFLYSKLTVDKSRWQQGNVFSCSVMHEALHNHYTQKSLSLSPGK

SEQ ID NO: 510 - protein, 451 aa, synthetic construct
  REGION 1..451: note = Description of Artificial Sequence: Synthetic polypeptide
QVQLVESGGGVVQPGRSLRLSCAASGFTFSNFGMHWVRQAPGKGLEWVAVIWYDASNENYADAVKGRFTISRDNSKNTLYLQMNSLRAEDTAVYYCARDGTIFGVVLGDYWGQGTLVTVSSASTKGPSVFPLAPSSKSTSGGTAALGCLVKDYFPEPVTVSWNSGALTSGVHTFPAVLQSSGLYSLSSVVTVPSSSLGTQTYICNVNHKPSNTKVDKKVEPKSCDKTHTCPPCPAPELLGGPSVFLFPPKPKDTLMISRTPEVTCVVVDVSHEDPEVKFNWYVDGVEVHNAKTKPCEEQYGSTYRCVSVLTVLHQDWLNGKEYKCKVSNKALPAPIEKTISKAKGQPREPQVYTLPPSREEMTKNQVSLTCLVKGFYPSDIAVEWESNGQPENNYKTTPPVLDSDGSFFLYSKLTVDKSRWQQGNVFSCSVMHEALHNHYTQKSLSLSPGK

SEQ ID NO: 511 - protein, 450 aa, synthetic construct
  REGION 1..450: note = Description of Artificial Sequence: Synthetic polypeptide
QVQLVESGGGVVQPGRSLRLSCAASGFTFSSYGMHWVRQAPGKGLEWVAVIWYDASNKYYADAVKGRFTISRDNSKNTLYLQMNSLRAEDTAVYYCARDRTIFGVVLDYWGQGTLVTVSSASTKGPSVFPLAPSSKSTSGGTAALGCLVKDYFPEPVTVSWNSGALTSGVHTFPAVLQSSGLYSLSSVVTVPSSSLGTQTYICNVNHKPSNTKVDKKVEPKSCDKTHTCPPCPAPELLGGPSVFLFPPKPKDTLMISRTPEVTCVVVDVSHEDPEVKFNWYVDGVEVHNAKTKPCEEQYGSTYRCVSVLTVLHQDWLNGKEYKCKVSNKALPAPIEKTISKAKGQPREPQVYTLPPSREEMTKNQVSLTCLVKGFYPSDIAVEWESNGQPENNYKTTPPVLDSDGSFFLYSKLTVDKSRWQQGNVFSCSVMHEALHNHYTQKSLSLSPGK

SEQ ID NO: 512 - protein, 450 aa, synthetic construct
  REGION 1..450: note = Description of Artificial Sequence: Synthetic polypeptide
QVQLVESGGGVVQPGRSLRLSCAASGFTFSSYGMHWVRQAPGKGLEWVAVIWYDASNKYYADAVKGRFTISSDNSKNTLYLQMNSLRAEDTAVYYCARDRTIFGVVLDYWGQGTLVTVSSASTKGPSVFPLAPSSKSTSGGTAALGCLVKDYFPEPVTVSWNSGALTSGVHTFPAVLQSSGLYSLSSVVTVPSSSLGTQTYICNVNHKPSNTKVDKKVEPKSCDKTHTCPPCPAPELLGGPSVFLFPPKPKDTLMISRTPEVTCVVVDVSHEDPEVKFNWYVDGVEVHNAKTKPCEEQYGSTYRCVSVLTVLHQDWLNGKEYKCKVSNKALPAPIEKTISKAKGQPREPQVYTLPPSREEMTKNQVSLTCLVKGFYPSDIAVEWESNGQPENNYKTTPPVLDSDGSFFLYSKLTVDKSRWQQGNVFSCSVMHEALHNHYTQKSLSLSPGK

SEQ ID NO: 513 - protein, 450 aa, synthetic construct; identical to SEQ ID NO: 511
  REGION 1..450: note = Description of Artificial Sequence: Synthetic polypeptide

SEQ ID NO: 514 - protein, 450 aa, synthetic construct; identical to SEQ ID NO: 511
  REGION 1..450: note = Description of Artificial Sequence: Synthetic polypeptide

SEQ ID NO: 515 - protein, 450 aa, synthetic construct; identical to SEQ ID NO: 512
  REGION 1..450: note = Description of Artificial Sequence: Synthetic polypeptide

SEQ ID NO: 516 - protein, 450 aa, synthetic construct; identical to SEQ ID NO: 512
  REGION 1..450: note = Description of Artificial Sequence: Synthetic polypeptide

SEQ ID NO: 517 - protein, 450 aa, synthetic construct; identical to SEQ ID NO: 511
  REGION 1..450: note = Description of Artificial Sequence: Synthetic polypeptide

SEQ ID NO: 518 - protein, 450 aa, synthetic construct
  REGION 1..450: note = Description of Artificial Sequence: Synthetic polypeptide
QVQLVESGGGVVQPGRSLRLSCAASGFTFSSYGMHWVRQAPGKGLEWVAVIWYDASNKYYADSVKGRFTISRDNSKNTLYLQMNSLRAEDTAVYYCARDRTIFGVVLDYWGQGTLVTVSSASTKGPSVFPLAPSSKSTSGGTAALGCLVKDYFPEPVTVSWNSGALTSGVHTFPAVLQSSGLYSLSSVVTVPSSSLGTQTYICNVNHKPSNTKVDKKVEPKSCDKTHTCPPCPAPELLGGPSVFLFPPKPKDTLMISRTPEVTCVVVDVSHEDPEVKFNWYVDGVEVHNAKTKPCEEQYGSTYRCVSVLTVLHQDWLNGKEYKCKVSNKALPAPIEKTISKAKGQPREPQVYTLPPSREEMTKNQVSLTCLVKGFYPSDIAVEWESNGQPENNYKTTPPVLDSDGSFFLYSKLTVDKSRWQQGNVFSCSVMHEALHNHYTQKSLSLSPGK

SEQ ID NO: 519 - protein, 450 aa, synthetic construct
  REGION 1..450: note = Description of Artificial Sequence: Synthetic polypeptide
QVQLVESGGGVVQPGRSLRLSCAASGFTFSSYGMHWVRQAPGKGLEWVAVIWYDGSNKYYADAVKGRFTISRDNSKNTLYLQMNSLRAEDTAVYYCARDRTIFGVVLDYWGQGTLVTVSSASTKGPSVFPLAPSSKSTSGGTAALGCLVKDYFPEPVTVSWNSGALTSGVHTFPAVLQSSGLYSLSSVVTVPSSSLGTQTYICNVNHKPSNTKVDKKVEPKSCDKTHTCPPCPAPELLGGPSVFLFPPKPKDTLMISRTPEVTCVVVDVSHEDPEVKFNWYVDGVEVHNAKTKPCEEQYGSTYRCVSVLTVLHQDWLNGKEYKCKVSNKALPAPIEKTISKAKGQPREPQVYTLPPSREEMTKNQVSLTCLVKGFYPSDIAVEWESNGQPENNYKTTPPVLDSDGSFFLYSKLTVDKSRWQQGNVFSCSVMHEALHNHYTQKSLSLSPGK

SEQ ID NO: 520 - protein, 451 aa, synthetic construct; identical to SEQ ID NO: 486
  REGION 1..451: note = Description of Artificial Sequence: Synthetic polypeptide

SEQ ID NO: 521 - protein, 451 aa, synthetic construct; identical to SEQ ID NO: 491
  REGION 1..451: note = Description of Artificial Sequence: Synthetic polypeptide

SEQ ID NO: 522 - protein, 451 aa, synthetic construct; identical to SEQ ID NO: 486
  REGION 1..451: note = Description of Artificial Sequence: Synthetic polypeptide

SEQ ID NO: 523 - protein, 451 aa, synthetic construct; identical to SEQ ID NO: 491
  REGION 1..451: note = Description of Artificial Sequence: Synthetic polypeptide

SEQ ID NO: 524 - protein, 451 aa, synthetic construct; identical to SEQ ID NO: 474
  REGION 1..451: note = Description of Artificial Sequence: Synthetic polypeptide

SEQ ID NO: 525 - protein, 451 aa, synthetic construct; identical to SEQ ID NO: 487
  REGION 1..451: note = Description of Artificial Sequence: Synthetic polypeptide

SEQ ID NO: 526 - protein, 451 aa, synthetic construct; identical to SEQ ID NO: 488
  REGION 1..451: note = Description of Artificial Sequence: Synthetic polypeptide

SEQ ID NO: 527 - protein, 450 aa, synthetic construct
  REGION 1..450: note = Description of Artificial Sequence: Synthetic polypeptide
QVQLVESGGGVVQPGRSLRLSCAASGFSFSSYGMHWVRQPPGKGLEWVAAIWYDANNKYYADAVKGRFTISRDSSKNTLYLQMNSLRAEDTAVYYCARDRTIFGVVLEYWGQGTLVTVSSASTKGPSVFPLAPSSKSTSGGTAALGCLVKDYFPEPVTVSWNSGALTSGVHTFPAVLQSSGLYSLSSVVTVPSSSLGTQTYICNVNHKPSNTKVDKKVEPKSCDKTHTCPPCPAPELLGGPSVFLFPPKPKDTLMISRTPEVTCVVVDVSHEDPEVKFNWYVDGVEVHNAKTKPCEEQYGSTYRCVSVLTVLHQDWLNGKEYKCKVSNKALPAPIEKTISKAKGQPREPQVYTLPPSREEMTKNQVSLTCLVKGFYPSDIAVEWESNGQPENNYKTTPPVLDSDGSFFLYSKLTVDKSRWQQGNVFSCSVMHEALHNHYTQKSLSLSPGK

SEQ ID NO: 528 - protein, 450 aa, synthetic construct; identical to SEQ ID NO: 527
  REGION 1..450: note = Description of Artificial Sequence: Synthetic polypeptide

SEQ ID NO: 529 - protein, 450 aa, synthetic construct
  REGION 1..450: note = Description of Artificial Sequence: Synthetic polypeptide
QVQLVESGGGVVQPGRSLRLSCAASGFSFSSYGMHWVRQPPGKGLEWVAAIWYDANNKYYADAVKGRFTISRDSSKNTLYLQMNSLRAEDTAVYYCARDRTIFGVVLEYLGQGTLVTVSSASTKGPSVFPLAPSSKSTSGGTAALGCLVKDYFPEPVTVSWNSGALTSGVHTFPAVLQSSGLYSLSSVVTVPSSSLGTQTYICNVNHKPSNTKVDKKVEPKSCDKTHTCPPCPAPELLGGPSVFLFPPKPKDTLMISRTPEVTCVVVDVSHEDPEVKFNWYVDGVEVHNAKTKPCEEQYGSTYRCVSVLTVLHQDWLNGKEYKCKVSNKALPAPIEKTISKAKGQPREPQVYTLPPSREEMTKNQVSLTCLVKGFYPSDIAVEWESNGQPENNYKTTPPVLDSDGSFFLYSKLTVDKSRWQQGNVFSCSVMHEALHNHYTQKSLSLSPGK

SEQ ID NO: 530 - protein, 450 aa, synthetic construct; identical to SEQ ID NO: 527
  REGION 1..450: note = Description of Artificial Sequence: Synthetic polypeptide

SEQ ID NO: 531 - protein, 450 aa, synthetic construct; identical to SEQ ID NO: 529
  REGION 1..450: note = Description of Artificial Sequence: Synthetic polypeptide

SEQ ID NO: 532 - protein, 450 aa, synthetic construct; identical to SEQ ID NO: 529
  REGION 1..450: note = Description of Artificial Sequence: Synthetic polypeptide

SEQ ID NO: 533 - protein, 450 aa, synthetic construct; identical to SEQ ID NO: 527
  REGION 1..450: note = Description of Artificial Sequence: Synthetic polypeptide

SEQ ID NO: 534 - protein, 450 aa, synthetic construct
  REGION 1..450: note = Description of Artificial Sequence: Synthetic polypeptide
QVQLVESGGGVVQPGRSLRLSCAASGFSFSSYGMHWVRQPPGKGLEWVAAIWYDGNNKYYADAVKGRFTISRDSSKNTLYLQMNSLRAEDTAVYYCARDRTIFGVVLEYWGQGTLVTVSSASTKGPSVFPLAPSSKSTSGGTAALGCLVKDYFPEPVTVSWNSGALTSGVHTFPAVLQSSGLYSLSSVVTVPSSSLGTQTYICNVNHKPSNTKVDKKVEPKSCDKTHTCPPCPAPELLGGPSVFLFPPKPKDTLMISRTPEVTCVVVDVSHEDPEVKFNWYVDGVEVHNAKTKPCEEQYGSTYRCVSVLTVLHQDWLNGKEYKCKVSNKALPAPIEKTISKAKGQPREPQVYTLPPSREEMTKNQVSLTCLVKGFYPSDIAVEWESNGQPENNYKTTPPVLDSDGSFFLYSKLTVDKSRWQQGNVFSCSVMHEALHNHYTQKSLSLSPGK

SEQ ID NO: 535 - protein, 450 aa, synthetic construct
  REGION 1..450: note = Description of Artificial Sequence: Synthetic polypeptide
QVQLVESGGGVVQPGRSLRLSCAASGFSFSSYGMHWVRQPPGKGLEWVAAIWYDANNKYYADSVKGRFTISRDSSKNTLYLQMNSLRAEDTAVYYCARDRTIFGVVLEYWGQGTLVTVSSASTKGPSVFPLAPSSKSTSGGTAALGCLVKDYFPEPVTVSWNSGALTSGVHTFPAVLQSSGLYSLSSVVTVPSSSLGTQTYICNVNHKPSNTKVDKKVEPKSCDKTHTCPPCPAPELLGGPSVFLFPPKPKDTLMISRTPEVTCVVVDVSHEDPEVKFNWYVDGVEVHNAKTKPCEEQYGSTYRCVSVLTVLHQDWLNGKEYKCKVSNKALPAPIEKTISKAKGQPREPQVYTLPPSREEMTKNQVSLTCLVKGFYPSDIAVEWESNGQPENNYKTTPPVLDSDGSFFLYSKLTVDKSRWQQGNVFSCSVMHEALHNHYTQKSLSLSPGK

SEQ ID NO: 536 - protein, 450 aa, synthetic construct; identical to SEQ ID NO: 527
  REGION 1..450: note = Description of Artificial Sequence: Synthetic polypeptide

SEQ ID NO: 537 - protein, 450 aa, synthetic construct; identical to SEQ ID NO: 529
  REGION 1..450: note = Description of Artificial Sequence: Synthetic polypeptide

SEQ ID NO: 538 - protein, 450 aa, synthetic construct
  REGION 1..450: note = Description of Artificial Sequence: Synthetic polypeptide
QVQLVESGGGVVQPGRSLRLSCAASGFSFSSYGMHWVRQAPGKGLEWVAVIWYDASNKYYEDAVKGRFTISRDNSKNTLFLQVNSLRAEDTAVYYCARGITIFGHGFEYWGQGTLVTVSSASTKGPSVFPLAPSSKSTSGGTAALGCLVKDYFPEPVTVSWNSGALTSGVHTFPAVLQSSGLYSLSSVVTVPSSSLGTQTYICNVNHKPSNTKVDKKVEPKSCDKTHTCPPCPAPELLGGPSVFLFPPKPKDTLMISRTPEVTCVVVDVSHEDPEVKFNWYVDGVEVHNAKTKPCEEQYGSTYRCVSVLTVLHQDWLNGKEYKCKVSNKALPAPIEKTISKAKGQPREPQVYTLPPSREEMTKNQVSLTCLVKGFYPSDIAVEWESNGQPENNYKTTPPVLDSDGSFFLYSKLTVDKSRWQQGNVFSCSVMHEALHNHYTQKSLSLSPGK

SEQ ID NO: 539 - protein, 450 aa, synthetic construct
  REGION 1..450: note = Description of Artificial Sequence: Synthetic polypeptide
QVQLVESGGGVVQPGRSLRLSCAASGFSFSSYGMHWVRQAPGKGLEWVAVIWYDGSNKYYEDSVKGRFTISRDNSKNTLFLQVNSLRAEDTAVYYCARGITIFGHGFEYWGQGTLVTVSSASTKGPSVFPLAPSSKSTSGGTAALGCLVKDYFPEPVTVSWNSGALTSGVHTFPAVLQSSGLYSLSSVVTVPSSSLGTQTYICNVNHKPSNTKVDKKVEPKSCDKTHTCPPCPAPELLGGPSVFLFPPKPKDTLMISRTPEVTCVVVDVSHEDPEVKFNWYVDGVEVHNAKTKPCEEQYGSTYRCVSVLTVLHQDWLNGKEYKCKVSNKALPAPIEKTISKAKGQPREPQVYTLPPSREEMTKNQVSLTCLVKGFYPSDIAVEWESNGQPENNYKTTPPVLDSDGSFFLYSKLTVDKSRWQQGNVFSCSVMHEALHNHYTQKSLSLSPGK

SEQ ID NO: 540 - protein, 450 aa, synthetic construct
  REGION 1..450: note = Description of Artificial Sequence: Synthetic polypeptide
QVQLVESGGGVVQPGRSLRLSCAASGFSFSSYGMHWVRQAPGKGLEWVAVIWYDGSNKYYEDAVKGRFTISRDNSKNTLFLQVNSLRAEDTAVYYCARGITIFGHGFEYWGQGTLVTVSSASTKGPSVFPLAPSSKSTSGGTAALGCLVKDYFPEPVTVSWNSGALTSGVHTFPAVLQSSGLYSLSSVVTVPSSSLGTQTYICNVNHKPSNTKVDKKVEPKSCDKTHTCPPCPAPELLGGPSVFLFPPKPKDTLMISRTPEVTCVVVDVSHEDPEVKFNWYVDGVEVHNAKTKPCEEQYGSTYRCVSVLTVLHQDWLNGKEYKCKVSNKALPAPIEKTISKAKGQPREPQVYTLPPSREEMTKNQVSLTCLVKGFYPSDIAVEWESNGQPENNYKTTPPVLDSDGSFFLYSKLTVDKSRWQQGNVFSCSVMHEALHNHYTQKSLSLSPGK

SEQ ID NO: 541 - protein, 450 aa, synthetic construct
  REGION 1..450: note = Description of Artificial Sequence: Synthetic polypeptide
QVQLVESGGGVVQPGRSLRLSCAASGFSFSSYGMHWVRQAPGKGLEWVAVIWYDASNKYYEDSVKGRFTISRDNSKNTLFLQVNSLRAEDTAVYYCARGITIFGHGFEYWGQGTLVTVSSASTKGPSVFPLAPSSKSTSGGTAALGCLVKDYFPEPVTVSWNSGALTSGVHTFPAVLQSSGLYSLSSVVTVPSSSLGTQTYICNVNHKPSNTKVDKKVEPKSCDKTHTCPPCPAPELLGGPSVFLFPPKPKDTLMISRTPEVTCVVVDVSHEDPEVKFNWYVDGVEVHNAKTKPCEEQYGSTYRCVSVLTVLHQDWLNGKEYKCKVSNKALPAPIEKTISKAKGQPREPQVYTLPPSREEMTKNQVSLTCLVKGFYPSDIAVEWESNGQPENNYKTTPPVLDSDGSFFLYSKLTVDKSRWQQGNVFSCSVMHEALHNHYTQKSLSLSPGK

SEQ ID NO: 542 - protein, 450 aa, synthetic construct
  REGION 1..450: note = Description of Artificial Sequence: Synthetic polypeptide
QVQLVESGGGVVQPGRSLRLSCAASGFTFSNYGMHWVRQAPGEGLEWVAAIWFDASDKYYADAVKGRFTISRDNSKNTLYLQMNSLRAEDTAVYYCARDQAIFGVVPDYWGQGTLVTVSSASTKGPSVFPLAPSSKSTSGGTAALGCLVKDYFPEPVTVSWNSGALTSGVHTFPAVLQSSGLYSLSSVVTVPSSSLGTQTYICNVNHKPSNTKVDKKVEPKSCDKTHTCPPCPAPELLGGPSVFLFPPKPKDTLMISRTPEVTCVVVDVSHEDPEVKFNWYVDGVEVHNAKTKPCEEQYGSTYRCVSVLTVLHQDWLNGKEYKCKVSNKALPAPIEKTISKAKGQPREPQVYTLPPSREEMTKNQVSLTCLVKGFYPSDIAVEWESNGQPENNYKTTPPVLDSDGSFFLYSKLTVDKSRWQQGNVFSCSVMHEALHNHYTQKSLSLSPGK

SEQ ID NO: 543 - protein, 450 aa, synthetic construct
  REGION 1..450: note = Description of Artificial Sequence: Synthetic polypeptide
QVQLVESGGGVVQPGRSLRLSCAASGFTFSNYGMHWVRQAPGEGLEWVAAIWFDASDKYYADSVKGRFTISRDNSKNTLYLQMNSLRAEDTAVYYCARDQAIFGVVPDYWGQGTLVTVSSASTKGPSVFPLAPSSKSTSGGTAALGCLVKDYFPEPVTVSWNSGALTSGVHTFPAVLQSSGLYSLSSVVTVPSSSLGTQTYICNVNHKPSNTKVDKKVEPKSCDKTHTCPPCPAPELLGGPSVFLFPPKPKDTLMISRTPEVTCVVVDVSHEDPEVKFNWYVDGVEVHNAKTKPCEEQYGSTYRCVSVLTVLHQDWLNGKEYKCKVSNKALPAPIEKTISKAKGQPREPQVYTLPPSREEMTKNQVSLTCLVKGFYPSDIAVEWESNGQPENNYKTTPPVLDSDGSFFLYSKLTVDKSRWQQGNVFSCSVMHEALHNHYTQKSLSLSPGK

SEQ ID NO: 544 - protein, 450 aa, synthetic construct
  REGION 1..450: note = Description of Artificial Sequence: Synthetic polypeptide
QVQLVESGGGVVQPGRSLRLSCAASGFTFSNYGMHWVRQAPGEGLEWVAAIWFDGSDKYYADAVKGRFTISRDNSKNTLYLQMNSLRAEDTAVYYCARDQAIFGVVPDYWGQGTLVTVSSASTKGPSVFPLAPSSKSTSGGTAALGCLVKDYFPEPVTVSWNSGALTSGVHTFPAVLQSSGLYSLSSVVTVPSSSLGTQTYICNVNHKPSNTKVDKKVEPKSCDKTHTCPPCPAPELLGGPSVFLFPPKPKDTLMISRTPEVTCVVVDVSHEDPEVKFNWYVDGVEVHNAKTKPCEEQYGSTYRCVSVLTVLHQDWLNGKEYKCKVSNKALPAPIEKTISKAKGQPREPQVYTLPPSREEMTKNQVSLTCLVKGFYPSDIAVEWESNGQPENNYKTTPPVLDSDGSFFLYSKLTVDKSRWQQGNVFSCSVMHEALHNHYTQKSLSLSPGK

SEQ ID NO: 545 - protein, 450 aa, synthetic construct; identical to SEQ ID NO: 542
  REGION 1..450: note = Description of Artificial Sequence: Synthetic polypeptide

SEQ ID NO: 546 - protein, 450 aa, synthetic construct
  REGION 1..450: note = Description of Artificial Sequence: Synthetic polypeptide
QVQLVESGGGVVQPGRSLRLSCAASGFTFSNYGMHWVRQAPGKGLEWVAAIWFDASDKYYADAVKGRFTISRDNSKNTLYLQMNSLRAEDTAVYYCARDQAIFGVVPDYWGQGTLVTVSSASTKGPSVFPLAPSSKSTSGGTAALGCLVKDYFPEPVTVSWNSGALTSGVHTFPAVLQSSGLYSLSSVVTVPSSSLGTQTYICNVNHKPSNTKVDKKVEPKSCDKTHTCPPCPAPELLGGPSVFLFPPKPKDTLMISRTPEVTCVVVDVSHEDPEVKFNWYVDGVEVHNAKTKPCEEQYGSTYRCVSVLTVLHQDWLNGKEYKCKVSNKALPAPIEKTISKAKGQPREPQVYTLPPSREEMTKNQVSLTCLVKGFYPSDIAVEWESNGQPENNYKTTPPVLDSDGSFFLYSKLTVDKSRWQQGNVFSCSVMHEALHNHYTQKSLSLSPGK

SEQ ID NO: 547 - protein, 450 aa, synthetic construct; identical to SEQ ID NO: 546
  REGION 1..450: note = Description of Artificial Sequence: Synthetic polypeptide

SEQ ID NO: 548 - protein, 450 aa, synthetic construct; identical to SEQ ID NO: 542
  REGION 1..450: note = Description of Artificial Sequence: Synthetic polypeptide

SEQ ID NO: 549 - protein, 450 aa, synthetic construct; identical to SEQ ID NO: 546
  REGION 1..450: note = Description of Artificial Sequence: Synthetic polypeptide

SEQ ID NO: 550 - protein, 456 aa, synthetic construct
  REGION 1..456: note = Description of Artificial Sequence: Synthetic polypeptide
QVQLQESGPGLVKPSETLSLTCTVSGDSISSGGYYWSWIRQPPGKGLEWIGYIYYSGSTYYNPSLKSRVTISVDTSKNQFSLKLSSVTAADTAVYYCARDRITIFGVVMGGGMDVWGQGTTVTVSSASTKGPSVFPLAPSSKSTSGGTAALGCLVKDYFPEPVTVSWNSGALTSGVHTFPAVLQSSGLYSLSSVVTVPSSSLGTQTYICNVNHKPSNTKVDKKVEPKSCDKTHTCPPCPAPELLGGPSVFLFPPKPKDTLMISRTPEVTCVVVDVSHEDPEVKFNWYVDGVEVHNAKTKPCEEQYGSTYRCVSVLTVLHQDWLNGKEYKCKVSNKALPAPIEKTISKAKGQPREPQVYTLPPSREEMTKNQVSLTCLVKGFYPSDIAVEWESNGQPENNYKTTPPVLDSDGSFFLYSKLTVDKSRWQQGNVFSCSVMHEALHNHYTQKSLSLSPGK

SEQ ID NO: 551 - protein, 456 aa, synthetic construct; identical to SEQ ID NO: 550
  REGION 1..456: note = Description of Artificial Sequence: Synthetic polypeptide

SEQ ID NO: 552 - protein, 456 aa, synthetic construct
  REGION 1..456: note = Description of Artificial Sequence: Synthetic polypeptide
QVQLQESGPGLVKPSQTLSLTCTVSGDSISSGGYYWSWIRQPPGKGLEWIGYIYYSGSTYYNPSLKSRVTISVDTSKNQFSLKLSSVTAADTAVYYCARDRITIFGVVMGGGMDVWGQGTTVTVSSASTKGPSVFPLAPSSKSTSGGTAALGCLVKDYFPEPVTVSWNSGALTSGVHTFPAVLQSSGLYSLSSVVTVPSSSLGTQTYICNVNHKPSNTKVDKKVEPKSCDKTHTCPPCPAPELLGGPSVFLFPPKPKDTLMISRTPEVTCVVVDVSHEDPEVKFNWYVDGVEVHNAKTKPCEEQYGSTYRCVSVLTVLHQDWLNGKEYKCKVSNKALPAPIEKTISKAKGQPREPQVYTLPPSREEMTKNQVSLTCLVKGFYPSDIAVEWESNGQPENNYKTTPPVLDSDGSFFLYSKLTVDKSRWQQGNVFSCSVMHEALHNHYTQKSLSLSPGK

SEQ ID NO: 553 - protein, 456 aa, synthetic construct
  REGION 1..456: note = Description of Artificial Sequence: Synthetic polypeptide
QVQLQESGPGLVKPSETLSLTCTVSGDSISSGGYYWSWIRQHPGKGLEWIGYIYYSGSTYYNPSLKSRVTISVDTSKNQFSLKLSSVTAADTAVYYCARDRITIFGVVMGGGMDVWGQGTTVTVSSASTKGPSVFPLAPSSKSTSGGTAALGCLVKDYFPEPVTVSWNSGALTSGVHTFPAVLQSSGLYSLSSVVTVPSSSLGTQTYICNVNHKPSNTKVDKKVEPKSCDKTHTCPPCPAPELLGGPSVFLFPPKPKDTLMISRTPEVTCVVVDVSHEDPEVKFNWYVDGVEVHNAKTKPCEEQYGSTYRCVSVLTVLHQDWLNGKEYKCKVSNKALPAPIEKTISKAKGQPREPQVYTLPPSREEMTKNQVSLTCLVKGFYPSDIAVEWESNGQPENNYKTTPPVLDSDGSFFLYSKLTVDKSRWQQGNVFSCSVMHEALHNHYTQKSLSLSPGK

SEQ ID NO: 554 - protein, 456 aa, synthetic construct; identical to SEQ ID NO: 480
  REGION 1..456: note = Description of Artificial Sequence: Synthetic polypeptide

SEQ ID NO: 555 - protein, 456 aa, synthetic construct; identical to SEQ ID NO: 553
  REGION 1..456: note = Description of Artificial Sequence: Synthetic polypeptide

SEQ ID NO: 556 - protein, 456 aa, synthetic construct; identical to SEQ ID NO: 552
  REGION 1..456: note = Description of Artificial Sequence: Synthetic polypeptide

SEQ ID NO: 557 - protein, 453 aa, synthetic construct
  REGION 1..453: note = Description of Artificial Sequence: Synthetic polypeptide
QVQLVQSGAEVKKPGASVKVSCKASGYTFTGYYIHWVRQAPGQGLEWMGWINPESGGTDYSQRFQGRVTMTRDTSISTAYMELNRLRSDDTAVYYCAREATIFGMVIVPFDYWGQGTLVTVSSASTKGPSVFPLAPSSKSTSGGTAALGCLVKDYFPEPVTVSWNSGALTSGVHTFPAVLQSSGLYSLSSVVTVPSSSLGTQTYICNVNHKPSNTKVDKKVEPKSCDKTHTCPPCPAPELLGGPSVFLFPPKPKDTLMISRTPEVTCVVVDVSHEDPEVKFNWYVDGVEVHNAKTKPCEEQYGSTYRCVSVLTVLHQDWLNGKEYKCKVSNKALPAPIEKTISKAKGQPREPQVYTLPPSREEMTKNQVSLTCLVKGFYPSDIAVEWESNGQPENNYKTTPPVLDSDGSFFLYSKLTVDKSRWQQGNVFSCSVMHEALHNHYTQKSLSLSPGK

SEQ ID NO: 558 - protein, 453 aa, synthetic construct
  REGION 1..453: note = Description of Artificial Sequence: Synthetic polypeptide
QVPLVQSGAEVKKPGASVKVSCKASGYTFTGYYIHWVRQAPGQGLEWMGWINPESGGTDYSQRFQGRFTMTRDTSISTAYMELNRLRSDDTAVYYCAREATIFGMVIVPFDYWGQGTLVTVSSASTKGPSVFPLAPSSKSTSGGTAALGCLVKDYFPEPVTVSWNSGALTSGVHTFPAVLQSSGLYSLSSVVTVPSSSLGTQTYICNVNHKPSNTKVDKKVEPKSCDKTHTCPPCPAPELLGGPSVFLFPPKPKDTLMISRTPEVTCVVVDVSHEDPEVKFNWYVDGVEVHNAKTKPCEEQYGSTYRCVSVLTVLHQDWLNGKEYKCKVSNKALPAPIEKTISKAKGQPREPQVYTLPPSREEMTKNQVSLTCLVKGFYPSDIAVEWESNGQPENNYKTTPPVLDSDGSFFLYSKLTVDKSRWQQGNVFSCSVMHEALHNHYTQKSLSLSPGK

SEQ ID NO: 559 - protein, 453 aa, synthetic construct
  REGION 1..453: note = Description of Artificial Sequence: Synthetic polypeptide
QVQLVQSGAEVKKPGASVKVSCKASGYTFTGYYIHWVRQAPGQGLEWMGWINPDAGGTDYSQRFQGRVTMTRDTSISTAYMELNRLRSDDTAVYYCAREATIFGMVIVPFDYWGQGTLVTVSSASTKGPSVFPLAPSSKSTSGGTAALGCLVKDYFPEPVTVSWNSGALTSGVHTFPAVLQSSGLYSLSSVVTVPSSSLGTQTYICNVNHKPSNTKVDKKVEPKSCDKTHTCPPCPAPELLGGPSVFLFPPKPKDTLMISRTPEVTCVVVDVSHEDPEVKFNWYVDGVEVHNAKTKPCEEQYGSTYRCVSVLTVLHQDWLNGKEYKCKVSNKALPAPIEKTISKAKGQPREPQVYTLPPSREEMTKNQVSLTCLVKGFYPSDIAVEWESNGQPENNYKTTPPVLDSDGSFFLYSKLTVDKSRWQQGNVFSCSVMHEALHNHYTQKSLSLSPGK

SEQ ID NO: 560 - protein, 453 aa, synthetic construct
  REGION 1..453: note = Description of Artificial Sequence: Synthetic polypeptide
QVPLVQSGAEVKKPGASVKVSCKASGYTFTGYYIHWVRQAPGQGLEWMGWINPDAGGTDYSQRFQGRFTMTRDTSISTAYMELNRLRSDDTAVYYCAREATIFGMVIVPFDYWGQGTLVTVSSASTKGPSVFPLAPSSKSTSGGTAALGCLVKDYFPEPVTVSWNSGALTSGVHTFPAVLQSSGLYSLSSVVTVPSSSLGTQTYICNVNHKPSNTKVDKKVEPKSCDKTHTCPPCPAPELLGGPSVFLFPPKPKDTLMISRTPEVTCVVVDVSHEDPEVKFNWYVDGVEVHNAKTKPCEEQYGSTYRCVSVLTVLHQDWLNGKEYKCKVSNKALPAPIEKTISKAKGQPREPQVYTLPPSREEMTKNQVSLTCLVKGFYPSDIAVEWESNGQPENNYKTTPPVLDSDGSFFLYSKLTVDKSRWQQGNVFSCSVMHEALHNHYTQKSLSLSPGK

SEQ ID NO: 561 - protein, 453 aa, synthetic construct
  REGION 1..453: note = Description of Artificial Sequence: Synthetic polypeptide
QVQLVQSGAEVKKPGASVKVSCKASGYTFTGYYIHWVRQAPGQGLEWMGWINPDSGGTDYSQRFQGRVTMTRDTSISTAYMELNRLRSDDTAVYYCAREATIFGMVIVPFDYWGQGTLVTVSSASTKGPSVFPLAPSSKSTSGGTAALGCLVKDYFPEPVTVSWNSGALTSGVHTFPAVLQSSGLYSLSSVVTVPSSSLGTQTYICNVNHKPSNTKVDKKVEPKSCDKTHTCPPCPAPELLGGPSVFLFPPKPKDTLMISRTPEVTCVVVDVSHEDPEVKFNWYVDGVEVHNAKTKPCEEQYGSTYRCVSVLTVLHQDWLNGKEYKCKVSNKALPAPIEKTISKAKGQPREPQVYTLPPSREEMTKNQVSLTCLVKGFYPSDIAVEWESNGQPENNYKTTPPVLDSDGSFFLYSKLTVDKSRWQQGNVFSCSVMHEALHNHYTQKSLSLSPGK

SEQ ID NO: 562 - protein, 453 aa, synthetic construct
  REGION 1..453: note = Description of Artificial Sequence: Synthetic polypeptide
QVQLVQSGAEVKKPGASVKVSCKASGYTFTGYYIHWVRQAPGQGLEWMGWINPDSGGTDYSQRFQGRFTMTRDTSISTAYMELNRLRSDDTAVYYCAREATIFGMVIVPFDYWGQGTLVTVSSASTKGPSVFPLAPSSKSTSGGTAALGCLVKDYFPEPVTVSWNSGALTSGVHTFPAVLQSSGLYSLSSVVTVPSSSLGTQTYICNVNHKPSNTKVDKKVEPKSCDKTHTCPPCPAPELLGGPSVFLFPPKPKDTLMISRTPEVTCVVVDVSHEDPEVKFNWYVDGVEVHNAKTKPCEEQYGSTYRCVSVLTVLHQDWLNGKEYKCKVSNKALPAPIEKTISKAKGQPREPQVYTLPPSREEMTKNQVSLTCLVKGFYPSDIAVEWESNGQPENNYKTTPPVLDSDGSFFLYSKLTVDKSRWQQGNVFSCSVMHEALHNHYTQKSLSLSPGK

SEQ ID NO: 563 - protein, 453 aa, synthetic construct
  REGION 1..453: note = Description of Artificial Sequence: Synthetic polypeptide
QVPLVQSGAEVKKPGASVKVSCKASGYTFTGYYIHWVRQAPGQGLEWMGWINPDSGGTDYSQRFQGRVTMTRDTSISTAYMELNRLRSDDTAVYYCAREATIFGMVIVPFDYWGQGTLVTVSSASTKGPSVFPLAPSSKSTSGGTAALGCLVKDYFPEPVTVSWNSGALTSGVHTFPAVLQSSGLYSLSSVVTVPSSSLGTQTYICNVNHKPSNTKVDKKVEPKSCDKTHTCPPCPAPELLGGPSVFLFPPKPKDTLMISRTPEVTCVVVDVSHEDPEVKFNWYVDGVEVHNAKTKPCEEQYGSTYRCVSVLTVLHQDWLNGKEYKCKVSNKALPAPIEKTISKAKGQPREPQVYTLPPSREEMTKNQVSLTCLVKGFYPSDIAVEWESNGQPENNYKTTPPVLDSDGSFFLYSKLTVDKSRWQQGNVFSCSVMHEALHNHYTQKSLSLSPGK

SEQ ID NO: 564 - protein, 453 aa, synthetic construct
  REGION 1..453: note = Description of Artificial Sequence: Synthetic polypeptide
QVQLVQSGAEVKKPGASVKVSCKASGYTFTGYYIHWVRQAPGQGLEWMGWINPDAGGTDYSQRFQGRFTMTRDTSISTAYMELNRLRSDDTAVYYCAREATIFGMVIVPFDYWGQGTLVTVSSASTKGPSVFPLAPSSKSTSGGTAALGCLVKDYFPEPVTVSWNSGALTSGVHTFPAVLQSSGLYSLSSVVTVPSSSLGTQTYICNVNHKPSNTKVDKKVEPKSCDKTHTCPPCPAPELLGGPSVFLFPPKPKDTLMISRTPEVTCVVVDVSHEDPEVKFNWYVDGVEVHNAKTKPCEEQYGSTYRCVSVLTVLHQDWLNGKEYKCKVSNKALPAPIEKTISKAKGQPREPQVYTLPPSREEMTKNQVSLTCLVKGFYPSDIAVEWESNGQPENNYKTTPPVLDSDGSFFLYSKLTVDKSRWQQGNVFSCSVMHEALHNHYTQKSLSLSPGK

SEQ ID NO: 565 - protein, 453 aa, synthetic construct
  REGION 1..453: note = Description of Artificial Sequence: Synthetic polypeptide
QVPLVQSGAEVKKPGASVKVSCKASGYTFTGYYIHWVRQAPGQGLEWMGWINPDAGGTDYSQRFQGRVTMTRDTSISTAYMELNRLRSDDTAVYYCAREATIFGMVIVPFDYWGQGTLVTVSSASTKGPSVFPLAPSSKSTSGGTAALGCLVKDYFPEPVTVSWNSGALTSGVHTFPAVLQSSGLYSLSSVVTVPSSSLGTQTYICNVNHKPSNTKVDKKVEPKSCDKTHTCPPCPAPELLGGPSVFLFPPKPKDTLMISRTPEVTCVVVDVSHEDPEVKFNWYVDGVEVHNAKTKPCEEQYGSTYRCVSVLTVLHQDWLNGKEYKCKVSNKALPAPIEKTISKAKGQPREPQVYTLPPSREEMTKNQVSLTCLVKGFYPSDIAVEWESNGQPENNYKTTPPVLDSDGSFFLYSKLTVDKSRWQQGNVFSCSVMHEALHNHYTQKSLSLSPGK

SEQ ID NO: 566 - protein, 453 aa, synthetic construct
  REGION 1..453: note = Description of Artificial Sequence: Synthetic polypeptide
QVQLVQSGAEVKKPGASVKVSCKASGYTFTGYYIHWVRQAPGQGLEWMGWINPDAGGTDYSQRFQGRVTMTRDTSISTAYMELNSLRSDDTAVYYCAREATIFGMVIVPFDYWGQGTLVTVSSASTKGPSVFPLAPSSKSTSGGTAALGCLVKDYFPEPVTVSWNSGALTSGVHTFPAVLQSSGLYSLSSVVTVPSSSLGTQTYICNVNHKPSNTKVDKKVEPKSCDKTHTCPPCPAPELLGGPSVFLFPPKPKDTLMISRTPEVTCVVVDVSHEDPEVKFNWYVDGVEVHNAKTKPCEEQYGSTYRCVSVLTVLHQDWLNGKEYKCKVSNKALPAPIEKTISKAKGQPREPQVYTLPPSREEMTKNQVSLTCLVKGFYPSDIAVEWESNGQPENNYKTTPPVLDSDGSFFLYSKLTVDKSRWQQGNVFSCSVMHEALHNHYTQKSLSLSPGK

SEQ ID NO: 567 - protein, 453 aa, synthetic construct
  REGION 1..453: note = Description of Artificial Sequence: Synthetic polypeptide
QVQLVQSGAEVKKPGASVKVSCKASGYTFTGYYIHWVRQAPGQGLEWMGWINPESGGTDYSQRFQGRVTMTRDTSISTAYMELNSLRSDDTAVYYCAREATIFGMVIVPFDYWGQGTLVTVSSASTKGPSVFPLAPSSKSTSGGTAALGCLVKDYFPEPVTVSWNSGALTSGVHTFPAVLQSSGLYSLSSVVTVPSSSLGTQTYICNVNHKPSNTKVDKKVEPKSCDKTHTCPPCPAPELLGGPSVFLFPPKPKDTLMISRTPEVTCVVVDVSHEDPEVKFNWYVDGVEVHNAKTKPCEEQYGSTYRCVSVLTVLHQDWLNGKEYKCKVSNKALPAPIEKTISKAKGQPREPQVYTLPPSREEMTKNQVSLTCLVKGFYPSDIAVEWESNGQPENNYKTTPPVLDSDGSFFLYSKLTVDKSRWQQGNVFSCSVMHEALHNHYTQKSLSLSPGK

SEQ ID NO: 568 - protein, 453 aa, synthetic construct
  REGION 1..453: note = Description of Artificial Sequence: Synthetic polypeptide
QVPLVQSGAEVKKPGASVKVSCKASGYTFTGYYIHWVRQAPGQGLVWMGWISPNSGETSYAQKFQDRVTMTRDTSISTAYMELSRLRSDDTAVYFCAREATIFGMLIVPFDYWGQGTLVTVSSASTKGPSVFPLAPSSKSTSGGTAALGCLVKDYFPEPVTVSWNSGALTSGVHTFPAVLQSSGLYSLSSVVTVPSSSLGTQTYICNVNHKPSNTKVDKKVEPKSCDKTHTCPPCPAPELLGGPSVFLFPPKPKDTLMISRTPEVTCVVVDVSHEDPEVKFNWYVDGVEVHNAKTKPCEEQYGSTYRCVSVLTVLHQDWLNGKEYKCKVSNKALPAPIEKTISKAKGQPREPQVYTLPPSREEMTKNQVSLTCLVKGFYPSDIAVEWESNGQPENNYKTTPPVLDSDGSFFLYSKLTVDKSRWQQGNVFSCSVMHEALHNHYTQKSLSLSPGK

SEQ ID NO: 569 - protein, 453 aa, synthetic construct
  REGION 1..453: note = Description of Artificial Sequence: Synthetic polypeptide
QVPLVQSGAEVKKPGASVKVSCKASGYTFTGYYIHWVRQAPGQGLVWMGWISPNSGDTSYAQKFQDRVTMTRDTSISTAYMELSRLRSDDTAVYFCAREATIFGMLIVPFDYWGQGTLVTVSSASTKGPSVFPLAPSSKSTSGGTAALGCLVKDYFPEPVTVSWNSGALTSGVHTFPAVLQSSGLYSLSSVVTVPSSSLGTQTYICNVNHKPSNTKVDKKVEPKSCDKTHTCPPCPAPELLGGPSVFLFPPKPKDTLMISRTPEVTCVVVDVSHEDPEVKFNWYVDGVEVHNAKTKPCEEQYGSTYRCVSVLTVLHQDWLNGKEYKCKVSNKALPAPIEKTISKAKGQPREPQVYTLPPSREEMTKNQVSLTCLVKGFYPSDIAVEWESNGQPENNYKTTPPVLDSDGSFFLYSKLTVDKSRWQQGNVFSCSVMHEALHNHYTQKSLSLSPGK

SEQ ID NO: 570 - protein, 453 aa, synthetic construct; identical to SEQ ID NO: 568
  REGION 1..453: note = Description of Artificial Sequence: Synthetic polypeptide

SEQ ID NO: 571 - protein, 453 aa, synthetic construct
  REGION 1..453: note = Description of Artificial Sequence: Synthetic polypeptide
QVPLVQSGAEVKKPGASVKVSCKASGYTFTGYYIHWVRQAPGQGLVWMGWISPNSGETSYAQKFQDRVTMTRDTSISTAYMELSRLRSDDTAVYFCTREATIFGMLIVPFDYWGQGTLVTVSSASTKGPSVFPLAPSSKSTSGGTAALGCLVKDYFPEPVTVSWNSGALTSGVHTFPAVLQSSGLYSLSSVVTVPSSSLGTQTYICNVNHKPSNTKVDKKVEPKSCDKTHTCPPCPAPELLGGPSVFLFPPKPKDTLMISRTPEVTCVVVDVSHEDPEVKFNWYVDGVEVHNAKTKPCEEQYGSTYRCVSVLTVLHQDWLNGKEYKCKVSNKALPAPIEKTISKAKGQPREPQVYTLPPSREEMTKNQVSLTCLVKGFYPSDIAVEWESNGQPENNYKTTPPVLDSDGSFFLYSKLTVDKSRWQQGNVFSCSVMHEALHNHYTQKSLSLSPGK

SEQ ID NO: 572 - protein, 453 aa, synthetic construct; identical to SEQ ID NO: 478
  REGION 1..453: note = Description of Artificial Sequence: Synthetic polypeptide

SEQ ID NO: 573 - protein, 453 aa, synthetic construct; identical to SEQ ID NO: 571
  REGION 1..453: note = Description of Artificial Sequence: Synthetic polypeptide

SEQ ID NO: 574 - protein, 453 aa, synthetic construct; identical to SEQ ID NO: 569
  REGION 1..453: note = Description of Artificial Sequence: Synthetic polypeptide

SEQ ID NO: 575 - protein, 453 aa, synthetic construct
  REGION 1..453: note = Description of Artificial Sequence: Synthetic polypeptide
QVQLVQSGAEVKKPGASVKVSCKASGYTFTGYYIHWVRQAPGQGLEWMGWISPNSGETSYAQKFQDRVTMTRDTSISTAYMELSSLRSDDTAVYFCAREATIFGMLIVPFDYWGQGTLVTVSSASTKGPSVFPLAPSSKSTSGGTAALGCLVKDYFPEPVTVSWNSGALTSGVHTFPAVLQSSGLYSLSSVVTVPSSSLGTQTYICNVNHKPSNTKVDKKVEPKSCDKTHTCPPCPAPELLGGPSVFLFPPKPKDTLMISRTPEVTCVVVDVSHEDPEVKFNWYVDGVEVHNAKTKPCEEQYGSTYRCVSVLTVLHQDWLNGKEYKCKVSNKALPAPIEKTISKAKGQPREPQVYTLPPSREEMTKNQVSLTCLVKGFYPSDIAVEWESNGQPENNYKTTPPVLDSDGSFFLYSKLTVDKSRWQQGNVFSCSVMHEALHNHYTQKSLSLSPGK

SEQ ID NO: 576 - protein, 453 aa, synthetic construct
  REGION 1..453: note = Description of Artificial Sequence: Synthetic polypeptide
QVQLVQSGAEVKKPGASVKVSCKASGYTFTGYYIHWVRQAPGQGLEWMGWISPNSGETSYAQKFQDRVTMTRDTSISTAYMELSRLRSDDTAVYFCAREATIFGMLIVPFDYWGQGTLVTVSSASTKGPSVFPLAPSSKSTSGGTAALGCLVKDYFPEPVTVSWNSGALTSGVHTFPAVLQSSGLYSLSSVVTVPSSSLGTQTYICNVNHKPSNTKVDKKVEPKSCDKTHTCPPCPAPELLGGPSVFLFPPKPKDTLMISRTPEVTCVVVDVSHEDPEVKFNWYVDGVEVHNAKTKPCEEQYGSTYRCVSVLTVLHQDWLNGKEYKCKVSNKALPAPIEKTISKAKGQPREPQVYTLPPSREEMTKNQVSLTCLVKGFYPSDIAVEWESNGQPENNYKTTPPVLDSDGSFFLYSKLTVDKSRWQQGNVFSCSVMHEALHNHYTQKSLSLSPGK

SEQ ID NO: 577 - protein, 453 aa, synthetic construct
  REGION 1..453: note = Description of Artificial Sequence: Synthetic polypeptide
QVPLVQSGAEVKKPGASVKVSCKASGYTFTGYYIHWVRQAPGQGLEWMGWINPESGGTDYSQRFQGRVTMTRDTSISTAYMELSRLRSDDTAVYYCAREATIFGMVIVPFDYWGQGTLVTVSSASTKGPSVFPLAPSSKSTSGGTAALGCLVKDYFPEPVTVSWNSGALTSGVHTFPAVLQSSGLYSLSSVVTVPSSSLGTQTYICNVNHKPSNTKVDKKVEPKSCDKTHTCPPCPAPELLGGPSVFLFPPKPKDTLMISRTPEVTCVVVDVSHEDPEVKFNWYVDGVEVHNAKTKPCEEQYGSTYRCVSVLTVLHQDWLNGKEYKCKVSNKALPAPIEKTISKAKGQPREPQVYTLPPSREEMTKNQVSLTCLVKGFYPSDIAVEWESNGQPENNYKTTPPVLDSDGSFFLYSKLTVDKSRWQQGNVFSCSVMHEALHNHYTQKSLSLSPGK

SEQ ID NO: 578 - protein, 453 aa, synthetic construct
  REGION 1..453: note = Description of Artificial Sequence: Synthetic polypeptide
QVPLVQSGAEVKKPGASVKVSCKASGYTFTGYYIHWVRQAPGQGLEWMGWINPESGGTDYSQRFQGRFTMTRDTSISTAYMELSRLRSDDTAVYYCAREATIFGMVIVPFDYWGQGTLVTVSSASTKGPSVFPLAPSSKSTSGGTAALGCLVKDYFPEPVTVSWNSGALTSGVHTFPAVLQSSGLYSLSSVVTVPSSSLGTQTYICNVNHKPSNTKVDKKVEPKSCDKTHTCPPCPAPELLGGPSVFLFPPKPKDTLMISRTPEVTCVVVDVSHEDPEVKFNWYVDGVEVHNAKTKPCEEQYGSTYRCVSVLTVLHQDWLNGKEYKCKVSNKALPAPIEKTISKAKGQPREPQVYTLPPSREEMTKNQVSLTCLVKGFYPSDIAVEWESNGQPENNYKTTPPVLDSDGSFFLYSKLTVDKSRWQQGNVFSCSVMHEALHNHYTQKSLSLSPGK

SEQ ID NO: 579 - protein, 453 aa, synthetic construct
  REGION 1..453: note = Description of Artificial Sequence: Synthetic polypeptide
QVPLVQSGAEVKKPGASVKVSCKASGYTFTGYYIHWVRQAPGQGLEWMGWINPDSGGTDYSQRFQGRVTMTRDTSISTAYMELSRLRSDDTAVYYCAREATIFGMVIVPFDYWGQGTLVTVSSASTKGPSVFPLAPSSKSTSGGTAALGCLVKDYFPEPVTVSWNSGALTSGVHTFPAVLQSSGLYSLSSVVTVPSSSLGTQTYICNVNHKPSNTKVDKKVEPKSCDKTHTCPPCPAPELLGGPSVFLFPPKPKDTLMISRTPEVTCVVVDVSHEDPEVKFNWYVDGVEVHNAKTKPCEEQYGSTYRCVSVLTVLHQDWLNGKEYKCKVSNKALPAPIEKTISKAKGQPREPQVYTLPPSREEMTKNQVSLTCLVKGFYPSDIAVEWESNGQPENNYKTTPPVLDSDGSFFLYSKLTVDKSRWQQGNVFSCSVMHEALHNHYTQKSLSLSPGK

SEQ ID NO: 580 - protein, 453 aa, synthetic construct
  REGION 1..453: note = Description of Artificial Sequence: Synthetic polypeptide
QVQLVQSGAEVKKPGASVKVSCKASGYTFTGYYIHWVRQAPGQGLEWMGWINPESGGTDYSQRFQGRVTMTRDTSISTAYMELSSLRSDDTAVYYCAREATIFGMVIVPFDYWGQGTLVTVSSASTKGPSVFPLAPSSKSTSGGTAALGCLVKDYFPEPVTVSWNSGALTSGVHTFPAVLQSSGLYSLSSVVTVPSSSLGTQTYICNVNHKPSNTKVDKKVEPKSCDKTHTCPPCPAPELLGGPSVFLFPPKPKDTLMISRTPEVTCVVVDVSHEDPEVKFNWYVDGVEVHNAKTKPCEEQYGSTYRCVSVLTVLHQDWLNGKEYKCKVSNKALPAPIEKTISKAKGQPREPQVYTLPPSREEMTKNQVSLTCLVKGFYPSDIAVEWESNGQPENNYKTTPPVLDSDGSFFLYSKLTVDKSRWQQGNVFSCSVMHEALHNHYTQKSLSLSPGK

SEQ ID NO: 581 - protein, 453 aa, synthetic construct; identical to SEQ ID NO: 577
  REGION 1..453: note = Description of Artificial Sequence: Synthetic polypeptide

SEQ ID NO: 582 - protein, 453 aa, synthetic construct
  REGION 1..453: note = Description of Artificial Sequence: Synthetic polypeptide
QVPLVQSGAEVKKPGASVKVSCKASGYTFTGYYIHWVRQAPGQGLEWMGWISPNQGETNYAQKFQDRVTMTRDTSISTAYMELSRLRSDDTAVYYCAREATIFGMLIVPFDYWGQGTLVTVSSASTKGPSVFPLAPSSKSTSGGTAALGCLVKDYFPEPVTVSWNSGALTSGVHTFPAVLQSSGLYSLSSVVTVPSSSLGTQTYICNVNHKPSNTKVDKKVEPKSCDKTHTCPPCPAPELLGGPSVFLFPPKPKDTLMISRTPEVTCVVVDVSHEDPEVKFNWYVDGVEVHNAKTKPCEEQYGSTYRCVSVLTVLHQDWLNGKEYKCKVSNKALPAPIEKTISKAKGQPREPQVYTLPPSREEMTKNQVSLTCLVKGFYPSDIAVEWESNGQPENNYKTTPPVLDSDGSFFLYSKLTVDKSRWQQGNVFSCSVMHEALHNHYTQKSLSLSPGK

SEQ ID NO: 583 - protein, 453 aa, synthetic construct
  REGION 1..453: note = Description of Artificial Sequence: Synthetic polypeptide
QVPLVQSGAEVKKPGASVKVSCKASGYTFTGYYIHWVRQAPGQGLEWMGWISPNQGDTNYAQKFQDRVTMTRDTSISTAYMELSRLRSDDTAVYYCAREATIFGMLIVPFDYWGQGTLVTVSSASTKGPSVFPLAPSSKSTSGGTAALGCLVKDYFPEPVTVSWNSGALTSGVHTFPAVLQSSGLYSLSSVVTVPSSSLGTQTYICNVNHKPSNTKVDKKVEPKSCDKTHTCPPCPAPELLGGPSVFLFPPKPKDTLMISRTPEVTCVVVDVSHEDPEVKFNWYVDGVEVHNAKTKPCEEQYGSTYRCVSVLTVLHQDWLNGKEYKCKVSNKALPAPIEKTISKAKGQPREPQVYTLPPSREEMTKNQVSLTCLVKGFYPSDIAVEWESNGQPENNYKTTPPVLDSDGSFFLYSKLTVDKSRWQQGNVFSCSVMHEALHNHYTQKSLSLSPGK

SEQ ID NO: 584 - protein, 453 aa, synthetic construct
  REGION 1..453: note = Description of Artificial Sequence: Synthetic polypeptide
QVPLVQSGAEVKKPGASVKVSCKASGYTFTGYYIHWVRQAPGQGLEWMGWISPNQGETNYAQKFQDRVTMTRDTSISTAYMELSRLRSDDTAVYYCTREATIFGMLIVPFDYWGQGTLVTVSSASTKGPSVFPLAPSSKSTSGGTAALGCLVKDYFPEPVTVSWNSGALTSGVHTFPAVLQSSGLYSLSSVVTVPSSSLGTQTYICNVNHKPSNTKVDKKVEPKSCDKTHTCPPCPAPELLGGPSVFLFPPKPKDTLMISRTPEVTCVVVDVSHEDPEVKFNWYVDGVEVHNAKTKPCEEQYGSTYRCVSVLTVLHQDWLNGKEYKCKVSNKALPAPIEKTISKAKGQPREPQVYTLPPSREEMTKNQVSLTCLVKGFYPSDIAVEWESNGQPENNYKTTPPVLDSDGSFFLYSKLTVDKSRWQQGNVFSCSVMHEALHNHYTQKSLSLSPGK

SEQ ID NO: 585 - protein, 453 aa, synthetic construct
  REGION 1..453: note = Description of Artificial Sequence: Synthetic polypeptide
QVPLVQSGAEVKKPGASVKVSCKASGYTFTGYYIHWVRQAPGQGLEWMGWISPNNGETNYAQKFQDRVTMTRDTSISTAYMELSRLRSDDTAVYYCAREATIFGMLIVPFDYWGQGTLVTVSSASTKGPSVFPLAPSSKSTSGGTAALGCLVKDYFPEPVTVSWNSGALTSGVHTFPAVLQSSGLYSLSSVVTVPSSSLGTQTYICNVNHKPSNTKVDKKVEPKSCDKTHTCPPCPAPELLGGPSVFLFPPKPKDTLMISRTPEVTCVVVDVSHEDPEVKFNWYVDGVEVHNAKTKPCEEQYGSTYRCVSVLTVLHQDWLNGKEYKCKVSNKALPAPIEKTISKAKGQPREPQVYTLPPSREEMTKNQVSLTCLVKGFYPSDIAVEWESNGQPENNYKTTPPVLDSDGSFFLYSKLTVDKSRWQQGNVFSCSVMHEALHNHYTQKSLSLSPGK

SEQ ID NO: 586 - protein, 453 aa, synthetic construct
  REGION 1..453: note = Description of Artificial Sequence: Synthetic polypeptide
QVPLVQSGAEVKKPGASVKVSCKASGYTFTGYYIHWVRQAPGQGLEWMGWISPNNGDTNYAQKFQDRVTMTRDTSISTAYMELSRLRSDDTAVYYCAREATIFGMLIVPFDYWGQGTLVTVSSASTKGPSVFPLAPSSKSTSGGTAALGCLVKDYFPEPVTVSWNSGALTSGVHTFPAVLQSSGLYSLSSVVTVPSSSLGTQTYICNVNHKPSNTKVDKKVEPKSCDKTHTCPPCPAPELLGGPSVFLFPPKPKDTLMISRTPEVTCVVVDVSHEDPEVKFNWYVDGVEVHNAKTKPCEEQYGSTYRCVSVLTVLHQDWLNGKEYKCKVSNKALPAPIEKTISKAKGQPREPQVYTLPPSREEMTKNQVSLTCLVKGFYPSDIAVEWESNGQPENNYKTTPPVLDSDGSFFLYSKLTVDKSRWQQGNVFSCSVMHEALHNHYTQKSLSLSPGK

SEQ ID NO: 587 - protein, 453 aa, synthetic construct
  REGION 1..453: note = Description of Artificial Sequence: Synthetic polypeptide
QVPLVQSGAEVKKPGASVKVSCKASGYTFTGYYIHWVRQAPGQGLEWMGWISPNQGDTNYAQKFQDRVTMTRDTSISTAYMELSRLRSDDTAVYYCTREATIFGMLIVPFDYWGQGTLVTVSSASTKGPSVFPLAPSSKSTSGGTAALGCLVKDYFPEPVTVSWNSGALTSGVHTFPAVLQSSGLYSLSSVVTVPSSSLGTQTYICNVNHKPSNTKVDKKVEPKSCDKTHTCPPCPAPELLGGPSVFLFPPKPKDTLMISRTPEVTCVVVDVSHEDPEVKFNWYVDGVEVHNAKTKPCEEQYGSTYRCVSVLTVLHQDWLNGKEYKCKVSNKALPAPIEKTISKAKGQPREPQVYTLPPSREEMTKNQVSLTCLVKGFYPSDIAVEWESNGQPENNYKTTPPVLDSDGSFFLYSKLTVDKSRWQQGNVFSCSVMHEALHNHYTQKSLSLSPGK

SEQ ID NO: 588 - protein, 453 aa, synthetic construct
  REGION 1..453: note = Description of Artificial Sequence: Synthetic polypeptide
QVPLVQSGAEVKKPGASVKVSCKASGYTFTGYYIHWVRQAPGQGLEWMGWISPNNGETNYAQKFQDRVTMTRDTSISTAYMELSRLRSDDTAVYYCTREATIFGMLIVPFDYWGQGTLVTVSSASTKGPSVFPLAPSSKSTSGGTAALGCLVKDYFPEPVTVSWNSGALTSGVHTFPAVLQSSGLYSLSSVVTVPSSSLGTQTYICNVNHKPSNTKVDKKVEPKSCDKTHTCPPCPAPELLGGPSVFLFPPKPKDTLMISRTPEVTCVVVDVSHEDPEVKFNWYVDGVEVHNAKTKPCEEQYGSTYRCVSVLTVLHQDWLNGKEYKCKVSNKALPAPIEKTISKAKGQPREPQVYTLPPSREEMTKNQVSLTCLVKGFYPSDIAVEWESNGQPENNYKTTPPVLDSDGSFFLYSKLTVDKSRWQQGNVFSCSVMHEALHNHYTQKSLSLSPGK

SEQ ID NO: 589 - protein, 453 aa, synthetic construct; identical to SEQ ID NO: 582
  REGION 1..453: note = Description of Artificial Sequence: Synthetic polypeptide

SEQ ID NO: 590 - protein, 453 aa, synthetic construct; identical to SEQ ID NO: 586
  REGION 1..453: note = Description of Artificial Sequence: Synthetic polypeptide

SEQ ID NO: 591 - protein, 453 aa, synthetic construct; identical to SEQ ID NO: 583
  REGION 1..453: note = Description of Artificial Sequence: Synthetic polypeptide

SEQ ID NO: 592 - protein, 453 aa, synthetic construct; identical to SEQ ID NO: 585
  REGION 1..453: note = Description of Artificial Sequence: Synthetic polypeptide

SEQ ID NO: 593 - protein, 453 aa, synthetic construct
  REGION 1..453: note = Description of Artificial Sequence: Synthetic polypeptide
QVQLVQSGAEVKKPGASVKVSCKASGYTFTGYYIHWVRQAPGQGLEWMGWISPNQGETNYAQKFQDRVTMTRDTSISTAYMELSSLRSDDTAVYYCAREATIFGMLIVPFDYWGQGTLVTVSSASTKGPSVFPLAPSSKSTSGGTAALGCLVKDYFPEPVTVSWNSGALTSGVHTFPAVLQSSGLYSLSSVVTVPSSSLGTQTYICNVNHKPSNTKVDKKVEPKSCDKTHTCPPCPAPELLGGPSVFLFPPKPKDTLMISRTPEVTCVVVDVSHEDPEVKFNWYVDGVEVHNAKTKPCEEQYGSTYRCVSVLTVLHQDWLNGKEYKCKVSNKALPAPIEKTISKAKGQPREPQVYTLPPSREEMTKNQVSLTCLVKGFYPSDIAVEWESNGQPENNYKTTPPVLDSDGSFFLYSKLTVDKSRWQQGNVFSCSVMHEALHNHYTQKSLSLSPGK

SEQ ID NO: 594 - protein, 453 aa, synthetic construct; identical to SEQ ID NO: 593
  REGION 1..453: note = Description of Artificial Sequence: Synthetic polypeptide

SEQ ID NO: 595 - protein, 458 aa, synthetic construct; identical to SEQ ID NO: 472
  REGION 1..458: note = Description of Artificial Sequence: Synthetic polypeptide

SEQ ID NO: 596 - protein, 458 aa, synthetic construct; identical to SEQ ID NO: 472
  REGION 1..458: note = Description of Artificial Sequence: Synthetic polypeptide

SEQ ID NO: 597 - protein, 458 aa, synthetic construct; identical to SEQ ID NO: 472
  REGION 1..458: note = Description of Artificial Sequence: Synthetic polypeptide

SEQ ID NO: 598 - protein, 458 aa, synthetic construct; identical to SEQ ID NO: 472
  REGION 1..458: note = Description of Artificial Sequence: Synthetic polypeptide

SEQ ID NO: 599 - protein, 458 aa, synthetic construct; identical to SEQ ID NO: 472
  REGION 1..458: note = Description of Artificial Sequence: Synthetic polypeptide

SEQ ID NO: 600 - protein, 458 aa, synthetic construct; identical to SEQ ID NO: 472
  REGION 1..458: note = Description of Artificial Sequence: Synthetic polypeptide

SEQ ID NO: 601 - protein, 458 aa, synthetic construct; identical to SEQ ID NO: 472
  REGION 1..458: note = Description of Artificial Sequence: Synthetic polypeptide

SEQ ID NO: 602 - protein, 458 aa, synthetic construct; identical to SEQ ID NO: 472
  REGION 1..458: note = Description of Artificial Sequence: Synthetic polypeptide

SEQ ID NO: 603 - protein, 458 aa, synthetic construct; identical to SEQ ID NO: 472
  REGION 1..458: note = Description of Artificial Sequence: Synthetic polypeptide

SEQ ID NO: 604 - protein, 458 aa, synthetic construct; identical to SEQ ID NO: 472
  REGION 1..458: note = Description of Artificial Sequence: Synthetic polypeptide

SEQ ID NO: 605 - protein, 458 aa, synthetic construct; identical to SEQ ID NO: 472
  REGION 1..458: note = Description of Artificial Sequence: Synthetic polypeptide

SEQ ID NO: 606 - protein, 458 aa, synthetic construct; identical to SEQ ID NO: 472
  REGION 1..458: note = Description of Artificial Sequence: Synthetic polypeptide

SEQ ID NO: 607 - protein, 458 aa, synthetic construct
  REGION 1..458: note = Description of Artificial Sequence: Synthetic polypeptide
QMQVVQSGAEVKKPGASVKVSCKASGYTFTGYYMHWVRQAPGQGLEWMGWINPNSGGTNYAQKFQGRVTMTRDTSISTAYMELSSLRSDDTAVYYCARGGDYVFGTYRPHYYYGMDVWGQGTTVTVSSASTKGPSVFPLAPSSKSTSGGTAALGCLVKDYFPEPVTVSWNSGALTSGVHTFPAVLQSSGLYSLSSVVTVPSSSLGTQTYICNVNHKPSNTKVDKKVEPKSCDKTHTCPPCPAPELLGGPSVFLFPPKPKDTLMISRTPEVTCVVVDVSHEDPEVKFNWYVDGVEVHNAKTKPCEEQYGSTYRCVSVLTVLHQDWLNGKEYKCKVSNKALPAPIEKTISKAKGQPREPQVYTLPPSREEMTKNQVSLTCLVKGFYPSDIAVEWESNGQPENNYKTTPPVLDSDGSFFLYSKLTVDKSRWQQGNVFSCSVMHEALHNHYTQKSLSLSPGK

SEQ ID NO: 608 - protein, 458 aa, synthetic construct
  REGION 1..458: note = Description of Artificial Sequence: Synthetic polypeptide
QMQVVQSGAEVKKPGASVKVSCKASGYTFTGYYMHWVRQAPGQGLEWMGWINPNSGGTNYAQKFQGRVTMTRDTSISTAYMELSRLRSDDTAVYYCARGGDYVFGTYRPHYYYGMDVWGQGTTVTVSSASTKGPSVFPLAPSSKSTSGGTAALGCLVKDYFPEPVTVSWNSGALTSGVHTFPAVLQSSGLYSLSSVVTVPSSSLGTQTYICNVNHKPSNTKVDKKVEPKSCDKTHTCPPCPAPELLGGPSVFLFPPKPKDTLMISRTPEVTCVVVDVSHEDPEVKFNWYVDGVEVHNAKTKPCEEQYGSTYRCVSVLTVLHQDWLNGKEYKCKVSNKALPAPIEKTISKAKGQPREPQVYTLPPSREEMTKNQVSLTCLVKGFYPSDIAVEWESNGQPENNYKTTPPVLDSDGSFFLYSKLTVDKSRWQQGNVFSCSVMHEALHNHYTQKSLSLSPGK

SEQ ID NO: 609 - protein, 451 aa, synthetic construct; identical to SEQ ID NO: 509
  REGION 1..451: note = Description of Artificial Sequence: Synthetic polypeptide

SEQ ID NO: 610 - protein, 451 aa, synthetic construct; identical to SEQ ID NO: 491
  REGION 1..451: note = Description of Artificial Sequence: Synthetic polypeptide

SEQ ID NO: 611 - protein, 458 aa, synthetic construct; identical to SEQ ID NO: 472
  REGION 1..458: note = Description of Artificial Sequence: Synthetic polypeptide

SEQ ID NO: 612 - protein, 451 aa, synthetic construct
  REGION 1..451: note = Description of Artificial Sequence: Synthetic polypeptide
QVQLVESGGGVVQPGRSLRLSCTASGFTFSSYGIHWVRQAPGKGLEWVAVIWYDGSNKFHADSVKGRFTISRDNSKNTLYLQMNSLRAEDSAMYFCARGKVAGMPEAFEIWGQGTKVTVSSASTKGPSVFPLAPSSKSTSGGTAALGCLVKDYFPEPVTVSWNSGALTSGVHTFPAVLQSSGLYSLSSVVTVPSSSLGTQTYICNVNHKPSNTKVDKKVEPKSCDKTHTCPPCPAPELLGGPSVFLFPPKPKDTLMISRTPEVTCVVVDVSHEDPEVKFNWYVDGVEVHNAKTKPCEEQYGSTYRCVSVLTVLHQDWLNGKEYKCKVSNKALPAPIEKTISKAKGQPREPQVYTLPPSREEMTKNQVSLTCLVKGFYPSDIAVEWESNGQPENNYKTTPPVLDSDGSFFLYSKLTVDKSRWQQGNVFSCSVMHEALHNHYTQKSLSLSPGK

SEQ ID NO: 613 - protein, 459 aa, synthetic construct
  REGION 1..459: note = Description of Artificial Sequence: Synthetic polypeptide
QMQLVQSGAEVKKPGASVKVSCKASGYTFTSYDINWVRQATGQGLEWMGWMNPNSGNTGYAQKFQGRVTMTRDTSISTAYMELSSLRSQDTAVYYCARGGDYVWGSYRPYYYYYGMDVWGQGTTVTVSSASTKGPSVFPLAPSSKSTSGGTAALGCLVKDYFPEPVTVSWNSGALTSGVHTFPAVLQSSGLYSLSSVVTVPSSSLGTQTYICNVNHKPSNTKVDKKVEPKSCDKTHTCPPCPAPELLGGPSVFLFPPKPKDTLMISRTPEVTCVVVDVSHEDPEVKFNWYVDGVEVHNAKTKPCEEQYGSTYRCVSVLTVLHQDWLNGKEYKCKVSNKALPAPIEKTISKAKGQPREPQVYTLPPSREEMTKNQVSLTCLVKGFYPSDIAVEWESNGQPENNYKTTPPVLDSDGSFFLYSKLTVDKSRWQQGNVFSCSVMHEALHNHYTQKSLSLSPGK

SEQ ID NO: 614 - protein, 451 aa, synthetic construct
  REGION 1..451: note = Description of Artificial Sequence: Synthetic polypeptide
QVQLVESGGGVVQPGRSLRLSCAASGFTFSSYGIHWVRQAPGKGLEWVAVIWYDASNKFHADAVKGRFTISRDNSKNTLYLQMNSLRAEDSAMYFCARGKVAGMPEAFEIWGQGTKVTVSSASTKGPSVFPLAPSSKSTSGGTAALGCLVKDYFPEPVTVSWNSGALTSGVHTFPAVLQSSGLYSLSSVVTVPSSSLGTQTYICNVNHKPSNTKVDKKVEPKSCDKTHTCPPCPAPELLGGPSVFLFPPKPKDTLMISRTPEVTCVVVDVSHEDPEVKFNWYVDGVEVHNAKTKPCEEQYGSTYRCVSVLTVLHQDWLNGKEYKCKVSNKALPAPIEKTISKAKGQPREPQVYTLPPSREEMTKNQVSLTCLVKGFYPSDIAVEWESNGQPENNYKTTPPVLDSDGSFFLYSKLTVDKSRWQQGNVFSCSVMHEALHNHYTQKSLSLSPGK

SEQ ID NO: 615 - protein, 451 aa, synthetic construct
  REGION 1..451: note = Description of Artificial Sequence: Synthetic polypeptide
QVQLVESGGGVVQPGRSLRLSCTASGFTFSSYGIHWVRQAPGKGLEWVAVIWYDASNKFHADAVKGRFTISRDNSKNTLYLQMNSLRAEDSAMYFCARGKVAGMPEAFEIWGQGTKVTVSSASTKGPSVFPLAPSSKSTSGGTAALGCLVKDYFPEPVTVSWNSGALTSGVHTFPAVLQSSGLYSLSSVVTVPSSSLGTQTYICNVNHKPSNTKVDKKVEPKSCDKTHTCPPCPAPELLGGPSVFLFPPKPKDTLMISRTPEVTCVVVDVSHEDPEVKFNWYVDGVEVHNAKTKPCEEQYGSTYRCVSVLTVLHQDWLNGKEYKCKVSNKALPAPIEKTISKAKGQPREPQVYTLPPSREEMTKNQVSLTCLVKGFYPSDIAVEWESNGQPENNYKTTPPVLDSDGSFFLYSKLTVDKSRWQQGNVFSCSVMHEALHNHYTQKSLSLSPGK

SEQ ID NO: 616 - protein, 451 aa, synthetic construct; identical to SEQ ID NO: 614
  REGION 1..451: note = Description of Artificial Sequence: Synthetic polypeptide

SEQ ID NO: 617 - protein, 451 aa, synthetic construct
  REGION 1..451: note = Description of Artificial Sequence: Synthetic polypeptide
QVQLVESGGGVVQPGRSLRLSCAASGFTFSSYGIHWVRQAPGKGLEWVAVIWYDASNKFHADAVKGRFTISRDNSKNTLYLQMNSLRAEDSAMYFCARGKVAGMPEAFEIWGQGTLVTVSSASTKGPSVFPLAPSSKSTSGGTAALGCLVKDYFPEPVTVSWNSGALTSGVHTFPAVLQSSGLYSLSSVVTVPSSSLGTQTYICNVNHKPSNTKVDKKVEPKSCDKTHTCPPCPAPELLGGPSVFLFPPKPKDTLMISRTPEVTCVVVDVSHEDPEVKFNWYVDGVEVHNAKTKPCEEQYGSTYRCVSVLTVLHQDWLNGKEYKCKVSNKALPAPIEKTISKAKGQPREPQVYTLPPSREEMTKNQVSLTCLVKGFYPSDIAVEWESNGQPENNYKTTPPVLDSDGSFFLYSKLTVDKSRWQQGNVFSCSVMHEALHNHYTQKSLSLSPGK

SEQ ID NO: 618 - protein, 451 aa, synthetic construct
  REGION 1..451: note = Description of Artificial Sequence: Synthetic polypeptide
QVQLVESGGGVVQPGRSLRLSCAASGFTFSSYGIHWVRQAPGKGLEWVAVIWYDASNKFHADSVKGRFTISRDNSKNTLYLQMNSLRAEDSAMYFCARGKVAGMPEAFEIWGQGTKVTVSSASTKGPSVFPLAPSSKSTSGGTAALGCLVKDYFPEPVTVSWNSGALTSGVHTFPAVLQSSGLYSLSSVVTVPSSSLGTQTYICNVNHKPSNTKVDKKVEPKSCDKTHTCPPCPAPELLGGPSVFLFPPKPKDTLMISRTPEVTCVVVDVSHEDPEVKFNWYVDGVEVHNAKTKPCEEQYGSTYRCVSVLTVLHQDWLNGKEYKCKVSNKALPAPIEKTISKAKGQPREPQVYTLPPSREEMTKNQVSLTCLVKGFYPSDIAVEWESNGQPENNYKTTPPVLDSDGSFFLYSKLTVDKSRWQQGNVFSCSVMHEALHNHYTQKSLSLSPGK

SEQ ID NO: 619 - protein, 451 aa, synthetic construct
  REGION 1..451: note = Description of Artificial Sequence: Synthetic polypeptide
QVQLVESGGGVVQPGRSLRLSCAASGFTFSSYGIHWVRQAPGKGLEWVAVIWYDGSNKFHADAVKGRFTISRDNSKNTLYLQMNSLRAEDSAMYFCARGKVAGMPEAFEIWGQGTKVTVSSASTKGPSVFPLAPSSKSTSGGTAALGCLVKDYFPEPVTVSWNSGALTSGVHTFPAVLQSSGLYSLSSVVTVPSSSLGTQTYICNVNHKPSNTKVDKKVEPKSCDKTHTCPPCPAPELLGGPSVFLFPPKPKDTLMISRTPEVTCVVVDVSHEDPEVKFNWYVDGVEVHNAKTKPCEEQYGSTYRCVSVLTVLHQDWLNGKEYKCKVSNKALPAPIEKTISKAKGQPREPQVYTLPPSREEMTKNQVSLTCLVKGFYPSDIAVEWESNGQPENNYKTTPPVLDSDGSFFLYSKLTVDKSRWQQGNVFSCSVMHEALHNHYTQKSLSLSPGK

SEQ ID NO: 620 - protein, 459 aa, synthetic construct
  REGION 1..459: note = Description of Artificial Sequence: Synthetic polypeptide
QMQLVQSGAEVKKPGASVKVSCKASGYTFTSYDINWVRQATGQGLEWMGWMNPNSGGTGYAQKFQGRVTMTRDTSISTAYMELSSLRSQDTAVYYCARGGDYVWGSYRPYYYYYGMDVWGQGTTVTVSSASTKGPSVFPLAPSSKSTSGGTAALGCLVKDYFPEPVTVSWNSGALTSGVHTFPAVLQSSGLYSLSSVVTVPSSSLGTQTYICNVNHKPSNTKVDKKVEPKSCDKTHTCPPCPAPELLGGPSVFLFPPKPKDTLMISRTPEVTCVVVDVSHEDPEVKFNWYVDGVEVHNAKTKPCEEQYGSTYRCVSVLTVLHQDWLNGKEYKCKVSNKALPAPIEKTISKAKGQPREPQVYTLPPSREEMTKNQVSLTCLVKGFYPSDIAVEWESNGQPENNYKTTPPVLDSDGSFFLYSKLTVDKSRWQQGNVFSCSVMHEALHNHYTQKSLSLSPGK

SEQ ID NO: 621 - protein, 459 aa, synthetic construct; identical to SEQ ID NO: 613
  REGION 1..459: note = Description of Artificial Sequence: Synthetic polypeptide

SEQ ID NO: 622 - protein, 459 aa, synthetic construct; identical to SEQ ID NO: 620
  REGION 1..459: note = Description of Artificial Sequence: Synthetic polypeptide

SEQ ID NO: 623 - protein, 459 aa, synthetic construct
  REGION 1..459: note = Description of Artificial Sequence: Synthetic polypeptide
QMQLVQSGAEVKKPGASVKVSCKASGYTFTSYDINWVRQAPGQGLEWMGWMNPNSGGTGYAQKFQGRVTMTRDTSISTAYMELSSLRSDDTAVYYCARGGDYVWGSYRPYYYYYGMDVWGQGTTVTVSSASTKGPSVFPLAPSSKSTSGGTAALGCLVKDYFPEPVTVSWNSGALTSGVHTFPAVLQSSGLYSLSSVVTVPSSSLGTQTYICNVNHKPSNTKVDKKVEPKSCDKTHTCPPCPAPELLGGPSVFLFPPKPKDTLMISRTPEVTCVVVDVSHEDPEVKFNWYVDGVEVHNAKTKPCEEQYGSTYRCVSVLTVLHQDWLNGKEYKCKVSNKALPAPIEKTISKAKGQPREPQVYTLPPSREEMTKNQVSLTCLVKGFYPSDIAVEWESNGQPENNYKTTPPVLDSDGSFFLYSKLTVDKSRWQQGNVFSCSVMHEALHNHYTQKSLSLSPGK

SEQ ID NO: 624 - protein, 459 aa, synthetic construct; identical to SEQ ID NO: 620
  REGION 1..459: note = Description of Artificial Sequence: Synthetic polypeptide

SEQ ID NO: 625 - protein, 459 aa, synthetic construct
  REGION 1..459: note = Description of Artificial Sequence: Synthetic polypeptide
QMQLVQSGAEVKKPGASVKVSCKASGYTFTSYDINWVRQAPGQGLEWMGWMNPNSGNTGYAQKFQGRVTMTRDTSISTAYMELSSLRSDDTAVYYCARGGDYVWGSYRPYYYYYGMDVWGQGTTVTVSSASTKGPSVFPLAPSSKSTSGGTAALGCLVKDYFPEPVTVSWNSGALTSGVHTFPAVLQSSGLYSLSSVVTVPSSSLGTQTYICNVNHKPSNTKVDKKVEPKSCDKTHTCPPCPAPELLGGPSVFLFPPKPKDTLMISRTPEVTCVVVDVSHEDPEVKFNWYVDGVEVHNAKTKPCEEQYGSTYRCVSVLTVLHQDWLNGKEYKCKVSNKALPAPIEKTISKAKGQPREPQVYTLPPSREEMTKNQVSLTCLVKGFYPSDIAVEWESNGQPENNYKTTPPVLDSDGSFFLYSKLTVDKSRWQQGNVFSCSVMHEALHNHYTQKSLSLSPGK

SEQ ID NO: 626 - protein, 459 aa, synthetic construct
  REGION 1..459: note = Description of Artificial Sequence: Synthetic polypeptide
QMQLVQSGAEVKKPGASVKVSCKASGYTFTSYDINWVRQATGQGLEWMGWMNPNSGGTGYAQKFQGRVTMTRDTSISTAYMELSSLRSQDTAVYYCARGGDYVFGSYRPYYYYYGMDVWGQGTTVTVSSASTKGPSVFPLAPSSKSTSGGTAALGCLVKDYFPEPVTVSWNSGALTSGVHTFPAVLQSSGLYSLSSVVTVPSSSLGTQTYICNVNHKPSNTKVDKKVEPKSCDKTHTCPPCPAPELLGGPSVFLFPPKPKDTLMISRTPEVTCVVVDVSHEDPEVKFNWYVDGVEVHNAKTKPCEEQYGSTYRCVSVLTVLHQDWLNGKEYKCKVSNKALPAPIEKTISKAKGQPREPQVYTLPPSREEMTKNQVSLTCLVKGFYPSDIAVEWESNGQPENNYKTTPPVLDSDGSFFLYSKLTVDKSRWQQGNVFSCSVMHEALHNHYTQKSLSLSPGK

SEQ ID NO: 627 - protein, 459 aa, synthetic construct
  REGION 1..459: note = Description of Artificial Sequence: Synthetic polypeptide
QMQLVQSGAEVKKPGASVKVSCKASGYTFTSYDINWVRQAPGQGLEWMGWMNPNSGGTGYAQKFQGRVTMTRDTSISTAYMELSSLRSDDTAVYYCARGGDYVFGSYRPYYYYYGMDVWGQGTTVTVSSASTKGPSVFPLAPSSKSTSGGTAALGCLVKDYFPEPVTVSWNSGALTSGVHTFPAVLQSSGLYSLSSVVTVPSSSLGTQTYICNVNHKPSNTKVDKKVEPKSCDKTHTCPPCPAPELLGGPSVFLFPPKPKDTLMISRTPEVTCVVVDVSHEDPEVKFNWYVDGVEVHNAKTKPCEEQYGSTYRCVSVLTVLHQDWLNGKEYKCKVSNKALPAPIEKTISKAKGQPREPQVYTLPPSREEMTKNQVSLTCLVKGFYPSDIAVEWESNGQPENNYKTTPPVLDSDGSFFLYSKLTVDKSRWQQGNVFSCSVMHEALHNHYTQKSLSLSPGK

SEQ ID NO: 628 - protein, 451 aa, synthetic construct; identical to SEQ ID NO: 617
  REGION 1..451: note = Description of Artificial Sequence: Synthetic polypeptide

SEQ ID NO: 629 - protein, 13 aa, synthetic construct
  REGION 1..13: note = Description of Artificial Sequence: Synthetic peptide
SGSSSNIGSNTVN

SEQ ID NO: 630 - protein, 11 aa, synthetic construct
  REGION 1..11: note = Description of Artificial Sequence: Synthetic peptide
RASQDIRDYLG

SEQ ID NO: 631 - protein, 11 aa, synthetic construct
  REGION 1..11: note = Description of Artificial Sequence: Synthetic peptide
RASQDIRDYLG

SEQ ID NO: 632 - protein, 11 aa, synthetic construct
  REGION 1..11: note = Description of Artificial Sequence: Synthetic peptide
QASQDISNYLN

SEQ ID NO: 633 - protein, 17 aa, synthetic construct
  REGION 1..17: note = Description of Artificial Sequence: Synthetic peptide
KSSQSVLSSSNNKNYIA

SEQ ID NO: 634 - protein, 17 aa, synthetic construct
  REGION 1..17: note = Description of Artificial Sequence: Synthetic peptide
KSSQSVLSSSNNKNYIA

SEQ ID NO: 635 - protein, 17 aa, synthetic construct
  REGION 1..17: note = Description of Artificial Sequence: Synthetic peptide
KSSQSVLSSSNNKNYLA

SEQ ID NO: 636 - protein, 17 aa, synthetic construct
  REGION 1..17: note = Description of Artificial Sequence: Synthetic peptide
KSSQSVLSSSNNKNYLA

SEQ ID NO: 637 - protein, 12 aa, synthetic construct
  REGION 1..12: note = Description of Artificial Sequence: Synthetic peptide
RASQSISYSYLA

SEQ ID NO: 638 - protein, 11 aa, synthetic construct
  REGION 1..11: note = Description of Artificial Sequence: Synthetic peptide
RASQSVSSNLA

SEQ ID NO: 639 - protein, 11 aa, synthetic construct
  REGION 1..11: note = Description of Artificial Sequence: Synthetic peptide
RASQGIRNELG

SEQ ID NO: 640 - protein, 11 aa, synthetic construct
  REGION 1..11: note = Description of Artificial Sequence: Synthetic peptide
QASQDITNYLN

SEQ ID NO: 641 - protein, 11 aa, synthetic construct
  REGION 1..11: note = Description of Artificial Sequence: Synthetic peptide
RASQGLIIWLA

SEQ ID NO: 642 - protein, 11 aa, synthetic construct
  REGION 1..11: note = Description of Artificial Sequence: Synthetic peptide
RASQGLIIWLA

SEQ ID NO: 643 - protein, 11 aa, synthetic construct
  REGION 1..11: note = Description of Artificial Sequence: Synthetic peptide
RASQGIRNELG

SEQ ID NO: 644 - protein, 11 aa, synthetic construct
  REGION 1..11: note = Description of Artificial Sequence: Synthetic peptide
RASQGIRNELG

SEQ ID NO: 645 - protein, 11 aa, synthetic construct
  REGION 1..11: note = Description of Artificial Sequence: Synthetic peptide
RASQGIRNELG

SEQ ID NO: 646 - protein, 11 aa, synthetic construct
  REGION 1..11: note = Description of Artificial Sequence: Synthetic peptide
RASQGIRNELG

SEQ ID NO: 647 - protein, 11 aa, synthetic construct
  REGION 1..11: note = Description of Artificial Sequence: Synthetic peptide
RASQGIRNELG

SEQ ID NO: 648 - protein, 11 aa, synthetic construct
  REGION 1..11: note = Description of Artificial Sequence: Synthetic peptide
RASQGIRNELG

SEQ ID NO: 649 - protein, 11 aa, synthetic construct
  REGION 1..11: note = Description of Artificial Sequence: Synthetic peptide
RASQDIRDYLG

SEQ ID NO: 650 - protein, 11 aa, synthetic construct
  REGION 1..11: note = Description of Artificial Sequence: Synthetic peptide
RASQDIRDYLG

SEQ ID NO: 651 - protein, 11 aa, synthetic construct
  REGION 1..11: note = Description of Artificial Sequence: Synthetic peptide
RASQDIRDYLG

SEQ ID NO: 652 - protein, 11 aa, synthetic construct
  REGION 1..11: note = Description of Artificial Sequence: Synthetic peptide
RASQDIRDYLG

SEQ ID NO: 653 - protein, 11 aa, synthetic construct
  REGION 1..11: note = Description of Artificial Sequence: Synthetic peptide
RASQDIRDYLG

SEQ ID NO: 654 - protein, 11 aa, synthetic construct
  REGION 1..11: note = Description of Artificial Sequence: Synthetic peptide
RASQDIRDYLG

SEQ ID NO: 655 - protein, 11 aa, synthetic construct
  REGION 1..11: note = Description of Artificial Sequence: Synthetic peptide
RASQDIRDYLG

SEQ ID NO: 656 - protein, 11 aa, synthetic construct
  REGION 1..11: note = Description of Artificial Sequence: Synthetic peptide
RASQDLRNYLG

SEQ ID NO: 657 - protein, 11 aa, synthetic construct
  REGION 1..11: note = Description of Artificial Sequence: Synthetic peptide
RASQDLRNYLG

SEQ ID NO: 658 - protein, 11 aa, synthetic construct
  REGION 1..11: note = Description of Artificial Sequence: Synthetic peptide
RASQDLRNYLG

SEQ ID NO: 659 - protein, 11 aa, synthetic construct
  REGION 1..11: note = Description of Artificial Sequence: Synthetic peptide
RASQDLRNYLG

SEQ ID NO: 660 - protein, 11 aa, synthetic construct
  REGION 1..11: note = Description of Artificial Sequence: Synthetic peptide
RASQDLRNYLG

SEQ ID NO: 661 - protein, 11 aa, synthetic construct
  REGION 1..11: note = Description of Artificial Sequence: Synthetic peptide
RASQDLRNYLG

SEQ ID NO: 662 - protein, 11 aa, synthetic construct
  REGION 1..11: note = Description of Artificial Sequence: Synthetic peptide
RASQDLRNYLG

SEQ ID NO: 663 - protein, 11 aa, synthetic construct
  REGION 1..11: note = Description of Artificial Sequence: Synthetic peptide
RASQDLRNYLG

SEQ ID NO: 664 - protein, 11 aa, synthetic construct
  REGION 1..11: note = Description of Artificial Sequence: Synthetic peptide
RASQDLRNYLG

SEQ ID NO: 665 - protein, 11 aa, synthetic construct
  REGION 1..11: note = Description of Artificial Sequence: Synthetic peptide
RASQDLRNYLG

SEQ ID NO: 666 - protein, 11 aa, synthetic construct
  REGION 1..11: note = Description of Artificial Sequence: Synthetic peptide
RASQDLRNYLG

SEQ ID NO: 667 - protein, 11 aa, synthetic construct
  REGION 1..11: note = Description of Artificial Sequence: Synthetic peptide
RASQDLRNYLG

SEQ ID NO: 668 - protein, 11 aa, synthetic construct
  REGION 1..11: note = Description of Artificial Sequence: Synthetic peptide
QASQDISNYLN

SEQ ID NO: 669 - protein, 11 aa, synthetic construct
  REGION 1..11: note = Description of Artificial Sequence: Synthetic peptide
QASQDISNYLN

SEQ ID NO: 670 - protein, 11 aa, synthetic construct
  REGION 1..11: note = Description of Artificial Sequence: Synthetic peptide
QASQDISNYLN

SEQ ID NO: 671 - protein, 11 aa, synthetic construct
  REGION 1..11: note = Description of Artificial Sequence: Synthetic peptide
QASQDISNYLN

SEQ ID NO: 672 - protein, 11 aa, synthetic construct
  REGION 1..11: note = Description of Artificial Sequence: Synthetic peptide
QASQDISNYLN

SEQ ID NO: 673 - protein, 11 aa, synthetic construct
  REGION 1..11: note = Description of Artificial Sequence: Synthetic peptide
QASQDISNYLN

SEQ ID NO: 674 - protein, 11 aa, synthetic construct
  REGION 1..11: note = Description of Artificial Sequence: Synthetic peptide
QASQDISNYLN

SEQ ID NO: 675 - protein, 11 aa, synthetic construct
  REGION 1..11: note = Description of Artificial Sequence: Synthetic peptide
QASQDISNYLN

SEQ ID NO: 676 - protein, 11 aa, synthetic construct
  REGION 1..11: note = Description of Artificial Sequence: Synthetic peptide
QASQDISNYLN

SEQ ID NO: 677 - protein, 11 aa, synthetic construct
  REGION 1..11: note = Description of Artificial Sequence: Synthetic peptide
RASQDIRDYLG

SEQ ID NO: 678 - protein, 11 aa, synthetic construct
  REGION 1..11: note = Description of Artificial Sequence: Synthetic peptide
RASQDIRDYLG

SEQ ID NO: 679 - protein, 11 aa, synthetic construct
  REGION 1..11: note = Description of Artificial Sequence: Synthetic peptide
RASQDIRDYLG

SEQ ID NO: 680 - protein, 11 aa, synthetic construct
  REGION 1..11: note = Description of Artificial Sequence: Synthetic peptide
RASQDIRDYLG

SEQ ID NO: 681 - protein, 11 aa, synthetic construct
  REGION 1..11: note = Description of Artificial Sequence: Synthetic peptide
RASQDIRDYLG

SEQ ID NO: 682 - protein, 11 aa, synthetic construct
  REGION 1..11: note = Description of Artificial Sequence: Synthetic peptide
RASQDIRDYLG

SEQ ID NO: 683 - protein, 11 aa, synthetic construct
  REGION 1..11: note = Description of Artificial Sequence: Synthetic peptide
RASQDIRDYLG

SEQ ID NO: 684 - protein, 11 aa, synthetic construct
  REGION 1..11: note = Description of Artificial Sequence: Synthetic peptide
QASQDITNYLN

SEQ ID NO: 685 - protein, 11 aa, synthetic construct
  REGION 1..11: note = Description of Artificial Sequence: Synthetic peptide
QASQDITNYLN

SEQ ID NO: 686 - protein, 11 aa, synthetic construct
  REGION 1..11: note = Description of Artificial Sequence: Synthetic peptide
QASQDITNYLN

SEQ ID NO: 687 - protein, 11 aa, synthetic construct
  REGION 1..11: note = Description of Artificial Sequence: Synthetic peptide
QASQDITNYLN

SEQ ID NO: 688 - protein, 11 aa, synthetic construct
  REGION 1..11: note = Description of Artificial Sequence: Synthetic peptide
QASQDITNYLN

SEQ ID NO: 689 - protein, 11 aa, synthetic construct
  REGION 1..11: note = Description of Artificial Sequence: Synthetic peptide
QASQDITNYLN

SEQ ID NO: 690 - protein, 11 aa, synthetic construct
  REGION 1..11: note = Description of Artificial Sequence: Synthetic peptide
QASQDITNYLN

SEQ ID NO: 691 - protein, 11 aa, synthetic construct
  REGION 1..11: note = Description of Artificial Sequence: Synthetic peptide
QASQDITNYLN

SEQ ID NO: 692 - protein, 11 aa, synthetic construct
  REGION 1..11: note = Description of Artificial Sequence: Synthetic peptide
QASQDITNYLN

SEQ ID NO: 693 - protein, 11 aa, synthetic construct
  REGION 1..11: note = Description of Artificial Sequence: Synthetic peptide
QASQDITNYLN

SEQ ID NO: 694 - protein, 11 aa, synthetic construct
  REGION 1..11: note = Description of Artificial Sequence: Synthetic peptide
QASQDITNYLN

SEQ ID NO: 695 - protein, 12 aa, synthetic construct
  REGION 1..12: note = Description of Artificial Sequence: Synthetic peptide
RASQIFTSTYLA

SEQ ID NO: 696 - protein, 12 aa, synthetic construct
  REGION 1..12: note = Description of Artificial Sequence: Synthetic peptide
RASQIFTSTYLA

SEQ ID NO: 697 - protein, 12 aa, synthetic construct
  REGION 1..12: note = Description of Artificial Sequence: Synthetic peptide
RASQIFTSTYLA

SEQ ID NO: 698 - protein, 12 aa, synthetic construct
  REGION 1..12: note = Description of Artificial Sequence: Synthetic peptide
RASQIFTSTYLA

SEQ ID NO: 699 - protein, 11 aa, synthetic construct
  REGION 1..11: note = Description of Artificial Sequence: Synthetic peptide
RASQSVSSNLA

SEQ ID NO: 700 - protein, 11 aa, synthetic construct
  REGION 1..11: note = Description of Artificial Sequence: Synthetic peptide
RASQSVSSNLA

SEQ ID NO: 701 - protein, 11 aa, synthetic construct
  REGION 1..11: note = Description of Artificial Sequence: Synthetic peptide
RASQSVSSNLA

SEQ ID NO: 702 - protein, 11 aa, synthetic construct
  REGION 1..11: note = Description of Artificial Sequence: Synthetic peptide
RASQSVSSNLA

SEQ ID NO: 703 - protein, 11 aa, synthetic construct
  REGION 1..11: note = Description of Artificial Sequence: Synthetic peptide
RASQSVSSNLA

SEQ ID NO: 704 - protein, 11 aa, synthetic construct
  REGION 1..11: note = Description of Artificial Sequence: Synthetic peptide
RASQSVSSNLA

SEQ ID NO: 705 - protein, 11 aa, synthetic construct
  REGION 1..11: note = Description of Artificial Sequence: Synthetic peptide
RASQSVSSNLA

SEQ ID NO: 706 - protein, 11 aa, synthetic construct
  REGION 1..11: note = Description of Artificial Sequence: Synthetic peptide
RASQSVSSNLA

SEQ ID NO: 707 - protein, 12 aa, synthetic construct
  REGION 1..12: note = Description of Artificial Sequence: Synthetic peptide
RASQSISYSYLA

SEQ ID NO: 708 - protein, 12 aa, synthetic construct
  REGION 1..12: note = Description of Artificial Sequence: Synthetic peptide
RASQSISYSYLA

SEQ ID NO: 709 - protein, 12 aa, synthetic construct
  REGION 1..12: note = Description of Artificial Sequence: Synthetic peptide
RASQSISYSYLA

SEQ ID NO: 710 - protein, 12 aa, synthetic construct
  REGION 1..12: note = Description of Artificial Sequence: Synthetic peptide
RASQSISYSYLA

SEQ ID NO: 711 - protein, 12 aa, synthetic construct
  REGION 1..12: note = Description of Artificial Sequence: Synthetic peptide
RASQSISYSYLA

SEQ ID NO: 712 - protein, 12 aa, synthetic construct
  REGION 1..12: note = Description of Artificial Sequence: Synthetic peptide
RASQSISYSYLA

SEQ ID NO: 713 - protein, 12 aa, synthetic construct
  REGION 1..12: note = Description of Artificial Sequence: Synthetic peptide
RASQSISYSYLA

SEQ ID NO: 714 - protein, 17 aa, synthetic construct
  REGION 1..17: note = Description of Artificial Sequence: Synthetic peptide
KSSQSVLSSSNNKNYIA

SEQ ID NO: 715 - protein, 17 aa, synthetic construct
  REGION 1..17: note = Description of Artificial Sequence: Synthetic peptide
KSSQSVLSSSNNKNYIA

SEQ ID NO: 716 - protein, 17 aa, synthetic construct
  REGION 1..17: note = Description of Artificial Sequence: Synthetic peptide
KSSQSVLSSSNNKNYIA

SEQ ID NO: 717 - protein, 17 aa, synthetic construct
  REGION 1..17: note = Description of Artificial Sequence: Synthetic peptide
KSSQSVLSSSNNKNYIA

SEQ ID NO: 718 - protein, 17 aa, synthetic construct
  REGION 1..17: note = Description of Artificial Sequence: Synthetic peptide
KSSQSVLSSSNNKNYIA

SEQ ID NO: 719 - protein, 17 aa, synthetic construct
  REGION 1..17: note = Description of Artificial Sequence: Synthetic peptide
KSSQSVLSSSNNKNYIA

SEQ ID NO: 720 - protein, 17 aa, synthetic construct
  REGION 1..17: note = Description of Artificial Sequence: Synthetic peptide
KSSQSVLSSSNNKNYIA

SEQ ID NO: 721 - protein, 17 aa, synthetic construct
  REGION 1..17: note = Description of Artificial Sequence: Synthetic peptide
KSSQSVLSSSNNKNYIA

SEQ ID NO: 722 - protein, 17 aa, synthetic construct
  REGION 1..17: note = Description of Artificial Sequence: Synthetic peptide
KSSQSVLSSSNNKNYIA

SEQ ID NO: 723 - protein, 17 aa, synthetic construct
  REGION 1..17: note = Description of Artificial Sequence: Synthetic peptide
KSSQSVLSSSNNKNYIA

SEQ ID NO: 724 - protein, 17 aa, synthetic construct
  REGION 1..17: note = Description of Artificial Sequence: Synthetic peptide
KSSQSVLSSSNNKNYIA

SEQ ID NO: 725 - protein, 17 aa, synthetic construct
  REGION 1..17: note = Description of Artificial Sequence: Synthetic peptide
KSSQSVLSSSNNKNYLA

SEQ ID NO: 726 - protein, 17 aa, synthetic construct
  REGION 1..17: note = Description of Artificial Sequence: Synthetic peptide
KSSQSVLSSSNNKNYLA

SEQ ID NO: 727 - protein, 17 aa, synthetic construct
  REGION 1..17: note = Description of Artificial Sequence: Synthetic peptide
KSSQSVLSSSNNKNYLA

SEQ ID NO: 728 - protein, 17 aa, synthetic construct
  REGION 1..17: note = Description of Artificial Sequence: Synthetic peptide
KSSQSVLSSSNNKNYLA

SEQ ID NO: 729 - protein, 17 aa, synthetic construct
  REGION 1..17: note = Description of Artificial Sequence: Synthetic peptide
KSSQSVLSSSNNKNYLA

SEQ ID NO: 730 - protein, 17 aa, synthetic construct
  REGION 1..17: note = Description of Artificial Sequence: Synthetic peptide
KSSQSVLSSSNNKNYLA

SEQ ID NO: 731 - protein, 17 aa, synthetic construct
  REGION 1..17: note = Description of Artificial Sequence: Synthetic peptide
KSSQSVLSSSNNKNYLA

SEQ ID NO: 732 - protein, 17 aa, synthetic construct
  REGION 1..17: note = Description of Artificial Sequence: Synthetic peptide
KSSQSVLSSSNNKNYLA

SEQ ID NO: 733 - protein, 17 aa, synthetic construct
  REGION 1..17: note = Description of Artificial Sequence: Synthetic peptide
KSSQSVLSSSNNKNYLA

SEQ ID NO: 734 - protein, 17 aa, synthetic construct
  REGION 1..17: note = Description of Artificial Sequence: Synthetic peptide
KSSQSVLSSSNNKNYIA

SEQ ID NO: 735 - protein, 17 aa, synthetic construct
  REGION 1..17: note = Description of Artificial Sequence: Synthetic peptide
KSSQSVLSSSNNKNYIA

SEQ ID NO: 736 - protein, 17 aa, synthetic construct
  REGION 1..17: note = Description of Artificial Sequence: Synthetic peptide
KSSQSVLSSSNNKNYIA

SEQ ID NO: 737 - protein, 17 aa, synthetic construct
  REGION 1..17: note = Description of Artificial Sequence: Synthetic peptide
KSSQSVLSSSNNKNYIA

SEQ ID NO: 738 - protein, 17 aa, synthetic construct
  REGION 1..17: note = Description of Artificial Sequence: Synthetic peptide
KSSQSVLSSSNNKNYIA

SEQ ID NO: 739 - protein, 17 aa, synthetic construct
  REGION 1..17: note = Description of Artificial Sequence: Synthetic peptide
KSSQSVLSSSNNKNYLA

SEQ ID NO: 740 - protein, 17 aa, synthetic construct
  REGION 1..17: note = Description of Artificial Sequence: Synthetic peptide
KSSQSVLSSSNNKNYLA

SEQ ID NO: 741 - protein, 17 aa, synthetic construct
  REGION 1..17: note = Description of Artificial Sequence: Synthetic peptide
KSSQSVLSSSNNKNYLA

SEQ ID NO: 742 - protein, 17 aa, synthetic construct
  REGION 1..17: note = Description of Artificial Sequence: Synthetic peptide
KSSQSVLSSSNNKNYLA

SEQ ID NO: 743 - protein, 17 aa, synthetic construct
  REGION 1..17: note = Description of Artificial Sequence: Synthetic peptide
KSSQSVLSSSNNKNYLA

SEQ ID NO: 744 - protein, 17 aa, synthetic construct
  REGION 1..17: note = Description of Artificial Sequence: Synthetic peptide
KSSQSVLSSSNNKNYLA

SEQ ID NO: 745 - protein, 17 aa, synthetic construct
  REGION 1..17: note = Description of Artificial Sequence: Synthetic peptide
KSSQSVLSSSNNKNYLA

SEQ ID NO: 746 - protein, 17 aa, synthetic construct
  REGION 1..17: note = Description of Artificial Sequence: Synthetic peptide
KSSQSVLSSSNNKNYLA

SEQ ID NO: 747 - protein, 17 aa, synthetic construct
  REGION 1..17: note = Description of Artificial Sequence: Synthetic peptide
KSSQSVLSSSNNKNYLA

SEQ ID NO: 748 - protein, 17 aa, synthetic construct
  REGION 1..17: note = Description of Artificial Sequence: Synthetic peptide
KSSQSVLSSSNNKNYLA

SEQ ID NO: 749 - protein, 17 aa, synthetic construct
  REGION 1..17: note = Description of Artificial Sequence: Synthetic peptide
KSSQSVLSSSNNKNYLA

SEQ ID NO: 750 - protein, 17 aa, synthetic construct
  REGION 1..17: note = Description of Artificial Sequence: Synthetic peptide
KSSQSVLSSSNNKNYLA

SEQ ID NO: 751 - protein, 17 aa, synthetic construct
  REGION 1..17: note = Description of Artificial Sequence: Synthetic peptide
KSSQSVLSSSNNKNYLA

SEQ ID NO: 752 - protein, 13 aa, synthetic construct
  REGION 1..13: note = Description of Artificial Sequence: Synthetic peptide
SGSSSNIGSQTVN

SEQ ID NO: 753 - protein, 13 aa, synthetic construct
  REGION 1..13: note = Description of Artificial Sequence: Synthetic peptide
SGSSSNIGSQTVN

SEQ ID NO: 754 - protein, 13 aa, synthetic construct
  REGION 1..13: note = Description of Artificial Sequence: Synthetic peptide
SGSSSNIGSNYVN

SEQ ID NO: 755 - protein, 13 aa, synthetic construct
  REGION 1..13: note = Description of Artificial Sequence: Synthetic peptide
SGSSSNIGSNYVN

SEQ ID NO: 756 - protein, 13 aa, synthetic construct
  REGION 1..13: note = Description of Artificial Sequence: Synthetic peptide
SGSSSNIGSQTVN

SEQ ID NO: 757 - protein, 13 aa, synthetic construct
  REGION 1..13: note = Description of Artificial Sequence: Synthetic peptide
SGSSSNIGSNYVN

SEQ ID NO: 758 - protein, 13 aa, synthetic construct
  REGION 1..13: note = Description of Artificial Sequence: Synthetic peptide
SGSSSNIGSNTVN

SEQ ID NO: 759 - protein, 13 aa, synthetic construct
  REGION 1..13: note = Description of Artificial Sequence: Synthetic peptide
SGSSSNIGSNTVN

SEQ ID NO: 760 - protein, 13 aa, synthetic construct
  REGION 1..13: note = Description of Artificial Sequence: Synthetic peptide
SGSSSNIGSNTVN

SEQ ID NO: 761 - protein, 13 aa, synthetic construct
  REGION 1..13: note = Description of Artificial Sequence: Synthetic peptide
SGSSSNIGSNTVN

SEQ ID NO: 762 - protein, 13 aa, synthetic construct
  REGION 1..13: note = Description of Artificial Sequence: Synthetic peptide
SGSSSNIGSNTVN

SEQ ID NO: 763 - protein, 13 aa, synthetic construct
  REGION 1..13: note = Description of Artificial Sequence: Synthetic peptide
SGSSSNIGSNYVN

SEQ ID NO: 764 - protein, 13 aa, synthetic construct
  REGION 1..13: note = Description of Artificial Sequence: Synthetic peptide
SGSSSNIGSNYVN

SEQ ID NO: 765 - protein, 13 aa, synthetic construct
  REGION 1..13: note = Description of Artificial Sequence: Synthetic peptide
SGSSSNIGSQTVN

SEQ ID NO: 766 - protein, 11 aa, synthetic construct
  REGION 1..11: note = Description of Artificial Sequence: Synthetic peptide
RASQDLRNYLG

SEQ ID NO: 767 - protein, 11 aa, synthetic construct
  REGION 1..11: note = Description of Artificial Sequence: Synthetic peptide
RASQDIRDYLG

SEQ ID NO: 768 - protein, 13 aa, synthetic construct
  REGION 1..13: note = Description of Artificial Sequence: Synthetic peptide
SGSSSNIGSNTVN

SEQ ID NO: 769 - protein, 11 aa, synthetic construct
  REGION 1..11: note = Description of Artificial Sequence: Synthetic peptide
RASQTISRFLN

SEQ ID NO: 770 - protein, 13 aa, synthetic construct
  REGION 1..13: note = Description of Artificial Sequence: Synthetic peptide
SGSSSNIGNNYVS

SEQ ID NO: 771 - protein, 11 aa, synthetic construct
  REGION 1..11: note = Description of Artificial Sequence: Synthetic peptide
RASQTISRFLN

SEQ ID NO: 772 - protein, 11 aa, synthetic construct
  REGION 1..11: note = Description of Artificial Sequence: Synthetic peptide
RASQTISRFLN

SEQ ID NO: 773 - protein, 11 aa, synthetic construct
  REGION 1..11: note = Description of Artificial Sequence: Synthetic peptide
RASQTISRFLN

SEQ ID NO: 774 - protein, 11 aa, synthetic construct
  REGION 1..11: note = Description of Artificial Sequence: Synthetic peptide
RASQTISRFLN

SEQ ID NO: 775 - protein, 11 aa, synthetic construct
  REGION 1..11: note = Description of Artificial Sequence: Synthetic peptide
RASQTISRFLN

SEQ ID NO: 776 - protein, 11 aa, synthetic construct
  REGION 1..11: note = Description of Artificial Sequence: Synthetic peptide
RASQTISRFLN

SEQ ID NO: 777 - protein, 13 aa, synthetic construct
  REGION 1..13: note = Description of Artificial Sequence: Synthetic peptide
SGSSSNIGNNYVS

SEQ ID NO: 778 - protein, 13 aa, synthetic construct
  REGION 1..13: note = Description of Artificial Sequence: Synthetic peptide
SGSSSNIGNNYVS

SEQ ID NO: 779 - protein, 13 aa, synthetic construct
  REGION 1..13: note = Description of Artificial Sequence: Synthetic peptide
SGSSSNIGNNYVS

SEQ ID NO: 780 - protein, 13 aa, synthetic construct
  REGION 1..13: note = Description of Artificial Sequence: Synthetic peptide
SGSSSNIGNNYVS

SEQ ID NO: 781 - protein, 13 aa, synthetic construct
  REGION 1..13: note = Description of Artificial Sequence: Synthetic peptide
SGSSSNIGNNYVS

SEQ ID NO: 782 - protein, 13 aa, synthetic construct
  REGION 1..13: note = Description of Artificial Sequence: Synthetic peptide
SGSSSNIGNNYVS

SEQ ID NO: 783 - protein, 13 aa, synthetic construct
  REGION 1..13: note = Description of Artificial Sequence: Synthetic peptide
SGSSSNIGNNYVS

SEQ ID NO: 784 - protein, 13 aa, synthetic construct
  REGION 1..13: note = Description of Artificial Sequence: Synthetic peptide
SGSSSNIGNNYVS

SEQ ID NO: 785 - protein, 11 aa, synthetic construct
  REGION 1..11: note = Description of Artificial Sequence: Synthetic peptide
RASQTISRFLN

SEQ ID NO: 786 - protein, 7 aa, synthetic construct
  REGION 1..7: note = Description of Artificial Sequence: Synthetic peptide
TNNQRPS

SEQ ID NO: 787 - protein, 7 aa, synthetic construct
  REGION 1..7: note = Description of Artificial Sequence: Synthetic peptide
GASSLQS

SEQ ID NO: 788 - protein, 7 aa, synthetic construct
  REGION 1..7: note = Description of Artificial Sequence: Synthetic peptide
GASSLQS

SEQ ID NO: 789 - protein, 7 aa, synthetic construct
  REGION 1..7: note = Description of Artificial Sequence: Synthetic peptide
DASNLET

SEQ ID NO: 790 - protein, 7 aa, synthetic construct
  REGION 1..7: note = Description of Artificial Sequence: Synthetic peptide
WASTRES

SEQ ID NO: 791 - protein, 7 aa, synthetic construct
  REGION 1..7: note = Description of Artificial Sequence: Synthetic peptide
WASTRES

SEQ ID NO: 792 - protein, 7 aa, synthetic construct
  REGION 1..7: note = Description of Artificial Sequence: Synthetic peptide
WTSTRDS

SEQ ID NO: 793 - protein, 7 aa, synthetic construct
  REGION 1..7: note = Description of Artificial Sequence: Synthetic peptide
WTSTRDS

SEQ ID NO: 794 - protein, 7 aa, synthetic construct
  REGION 1..7: note = Description of Artificial Sequence: Synthetic peptide
GASSRAT

SEQ ID NO: 795 - protein, 7 aa, synthetic construct
  REGION 1..7: note = Description of Artificial Sequence: Synthetic peptide
GAATRAT

SEQ ID NO: 796 - protein, 7 aa, synthetic construct
  REGION 1..7: note = Description of Artificial Sequence: Synthetic peptide
GASSLQS

SEQ ID NO: 797 - protein, 7 aa, synthetic construct
  REGION 1..7: note = Description of Artificial Sequence: Synthetic peptide
DASNLEP

SEQ ID NO: 798 - protein, 7 aa, synthetic construct
  REGION 1..7: note = Description of Artificial Sequence: Synthetic peptide
AASSLQS

SEQ ID NO: 799 - protein, 7 aa, synthetic construct
  REGION 1..7: note = Description of Artificial Sequence: Synthetic peptide
AASSLQS

SEQ ID NO: 800 - protein, 7 aa, synthetic construct
  REGION 1..7: note = Description of Artificial Sequence: Synthetic peptide
GASSLQS

SEQ ID NO: 801 - protein, 7 aa, synthetic construct
  REGION 1..7: note = Description of Artificial Sequence: Synthetic peptide
GASSLQS

SEQ ID NO: 802 - protein, 7 aa, synthetic construct
  REGION 1..7: note = Description of Artificial Sequence: Synthetic peptide
GASSLQS

SEQ ID NO: 803 - protein, 7 aa, synthetic construct
  REGION 1..7: note = Description of Artificial Sequence: Synthetic peptide
GASSLQS

SEQ ID NO: 804 - protein, 7 aa, synthetic construct
  REGION 1..7: note = Description of Artificial Sequence: Synthetic peptide
GASSLQS

SEQ ID NO: 805 - protein, 7 aa, synthetic construct
  REGION 1..7: note = Description of Artificial Sequence: Synthetic peptide
GASSLQS

SEQ ID NO: 806 - protein, 7 aa, synthetic construct
  REGION 1..7: note = Description of Artificial Sequence: Synthetic peptide
GASSLQS

SEQ ID NO: 807 - protein, 7 aa, synthetic construct
  REGION 1..7: note = Description of Artificial Sequence: Synthetic peptide
GASSLQS

SEQ ID NO: 808 - protein, 7 aa, synthetic construct
  REGION 1..7: note = Description of Artificial Sequence: Synthetic peptide
GASSLQS

SEQ ID NO: 809 - protein, 7 aa, synthetic construct
  REGION 1..7: note = Description of Artificial Sequence: Synthetic peptide
GASSLQS

SEQ ID NO: 810 - protein, 7 aa, synthetic construct
  REGION 1..7: note = Description of Artificial Sequence: Synthetic peptide
GASSLQS

SEQ ID NO: 811 - protein, 7 aa, synthetic construct
  REGION 1..7: note = Description of Artificial Sequence: Synthetic peptide
GASSLQS

SEQ ID NO: 812 - protein, 7 aa, synthetic construct
  REGION 1..7: note = Description of Artificial Sequence: Synthetic peptide
GASSLQS

SEQ ID NO: 813 - protein, 7 aa, synthetic construct
  REGION 1..7: note = Description of Artificial Sequence: Synthetic peptide
GASSLQS

SEQ ID NO: 814 - protein, 7 aa, synthetic construct
  REGION 1..7: note = Description of Artificial Sequence: Synthetic peptide
GASSLQS

SEQ ID NO: 815 - protein, 7 aa, synthetic construct
  REGION 1..7: note = Description of Artificial Sequence: Synthetic peptide
GASSLQS

SEQ ID NO: 816 - protein, 7 aa, synthetic construct
  REGION 1..7: note = Description of Artificial Sequence: Synthetic peptide
GASSLQS

SEQ ID NO: 817 - protein, 7 aa, synthetic construct
  REGION 1..7: note = Description of Artificial Sequence: Synthetic peptide
GASSLQS

SEQ ID NO: 818 - protein, 7 aa, synthetic construct
  REGION 1..7: note = Description of Artificial Sequence: Synthetic peptide
GASSLQS

SEQ ID NO: 819 - protein, 7 aa, synthetic construct
  REGION 1..7: note = Description of Artificial Sequence: Synthetic peptide
GASSLQS

SEQ ID NO: 820 - protein, 7 aa, synthetic construct
  REGION 1..7: note = Description of Artificial Sequence: Synthetic peptide
GASSLQS

SEQ ID NO: 821 - protein, 7 aa, synthetic construct
  REGION 1..7: note = Description of Artificial Sequence: Synthetic peptide
GASSLQS

SEQ ID NO: 822 - protein, 7 aa, synthetic construct
  REGION 1..7: note = Description of Artificial Sequence: Synthetic peptide
GASSLQS

SEQ ID NO: 823 - protein, 7 aa, synthetic construct
  REGION 1..7: note = Description of Artificial Sequence: Synthetic peptide
GASSLQS

SEQ ID NO: 824 - protein, 7 aa, synthetic construct
  REGION 1..7: note = Description of Artificial Sequence: Synthetic peptide
GASSLQS

SEQ ID NO: 825 - protein, 7 aa, synthetic construct
  REGION 1..7: note = Description of Artificial Sequence: Synthetic peptide
DASNLET

SEQ ID NO: 826 - protein, 7 aa, synthetic construct
  REGION 1..7: note = Description of Artificial Sequence: Synthetic peptide
DASNLET

SEQ ID NO: 827 - protein, 7 aa, synthetic construct
  REGION 1..7: note = Description of Artificial Sequence: Synthetic peptide
DASNLET

SEQ ID NO: 828 - protein, 7 aa, synthetic construct
  REGION 1..7: note = Description of Artificial Sequence: Synthetic peptide
DASNLET

SEQ ID NO: 829 - protein, 7 aa, synthetic construct
  REGION 1..7: note = Description of Artificial Sequence: Synthetic peptide
DASNLET

SEQ ID NO: 830 - protein, 7 aa, synthetic construct
  REGION 1..7: note = Description of Artificial Sequence: Synthetic peptide
DASNLET

SEQ ID NO: 831 - protein, 7 aa, synthetic construct
  REGION 1..7: note = Description of Artificial Sequence: Synthetic peptide
DASNLET

SEQ ID NO: 832 - protein, 7 aa, synthetic construct
  REGION 1..7: note = Description of Artificial Sequence: Synthetic peptide
DASNLET

SEQ ID NO: 833 - protein, 7 aa, synthetic construct
  REGION 1..7: note = Description of Artificial Sequence: Synthetic peptide
DASNLET

SEQ ID NO: 834 - protein, 7 aa, synthetic construct
  REGION 1..7: note = Description of Artificial Sequence: Synthetic peptide
GASSLQS

SEQ ID NO: 835 - protein, 7 aa, synthetic construct
  REGION 1..7: note = Description of Artificial Sequence: Synthetic peptide
GASSLQS

SEQ ID NO: 836 - protein, 7 aa, synthetic construct
  REGION 1..7: note = Description of Artificial Sequence: Synthetic peptide
GASSLQS

SEQ ID NO: 837 - protein, 7 aa, synthetic construct
  REGION 1..7: note = Description of Artificial Sequence: Synthetic peptide
GASSLQS

SEQ ID NO: 838 - protein, 7 aa, synthetic construct
  REGION 1..7: note = Description of Artificial Sequence: Synthetic peptide
GASSLQS

SEQ ID NO: 839 - protein, 7 aa, synthetic construct
  REGION 1..7: note = Description of Artificial Sequence: Synthetic peptide
GASSLQS

SEQ ID NO: 840 - protein, 7 aa, synthetic construct
  REGION 1..7: note = Description of Artificial Sequence: Synthetic peptide
GASSLQS

SEQ ID NO: 841 - protein, 7 aa, synthetic construct
  REGION 1..7: note = Description of Artificial Sequence: Synthetic peptide
DASNLEP

SEQ ID NO: 842 - protein, 7 aa, synthetic construct
  REGION 1..7: note = Description of Artificial Sequence: Synthetic peptide
DASNLEP

SEQ ID NO: 843 - protein, 7 aa, synthetic construct
  REGION 1..7: note = Description of Artificial Sequence: Synthetic peptide
DASNLEP

SEQ ID NO: 844 - protein, 7 aa, synthetic construct
  REGION 1..7: note = Description of Artificial Sequence: Synthetic peptide
DASNLEP

SEQ ID NO: 845 - protein, 7 aa, synthetic construct
  REGION 1..7: note = Description of Artificial Sequence: Synthetic peptide
DASNLEP

SEQ ID NO: 846 - protein, 7 aa, synthetic construct
  REGION 1..7: note = Description of Artificial Sequence: Synthetic peptide
DASNLEP

SEQ ID NO: 847 - protein, 7 aa, synthetic construct
  REGION 1..7: note = Description of Artificial Sequence: Synthetic peptide
DASNLEP

SEQ ID NO: 848 - protein, 7 aa, synthetic construct
  REGION 1..7: note = Description of Artificial Sequence: Synthetic peptide
DASNLEP

SEQ ID NO: 849 - protein, 7 aa, synthetic construct
  REGION 1..7: note = Description of Artificial Sequence: Synthetic peptide
DASNLEP

SEQ ID NO: 850 - protein, 7 aa, synthetic construct
  REGION 1..7: note = Description of Artificial Sequence: Synthetic peptide
DASNLEP

SEQ ID NO: 851 - protein, 7 aa, synthetic construct
  REGION 1..7: note = Description of Artificial Sequence: Synthetic peptide
DASNLEP

SEQ ID NO: 852 - protein, 7 aa, synthetic construct
  REGION 1..7: note = Description of Artificial Sequence: Synthetic peptide
GASSRAT

SEQ ID NO: 853 - protein, 7 aa, synthetic construct
  REGION 1..7: note = Description of Artificial Sequence: Synthetic peptide
GASSRAT

SEQ ID NO: 854 - protein, 7 aa, synthetic construct
  REGION 1..7: note = Description of Artificial Sequence: Synthetic peptide
GASSRAT

SEQ ID NO: 855 - protein, 7 aa, synthetic construct
  REGION 1..7: note = Description of Artificial Sequence: Synthetic peptide
GASSRAT

SEQ ID NO: 856 - protein, 7 aa, synthetic construct
  REGION 1..7: note = Description of Artificial Sequence: Synthetic peptide
GAATRAT

SEQ ID NO: 857 - protein, 7 aa, synthetic construct
  REGION 1..7: note = Description of Artificial Sequence: Synthetic peptide
GAATRAT

SEQ ID NO: 858 - protein, 7 aa, synthetic construct
  REGION 1..7: note = Description of Artificial Sequence: Synthetic peptide
GAATRAT

SEQ ID NO: 859 - protein, 7 aa, synthetic construct
  REGION 1..7: note = Description of Artificial Sequence: Synthetic peptide
GAATRAT

SEQ ID NO: 860 - protein, 7 aa, synthetic construct
  REGION 1..7: note = Description of Artificial Sequence: Synthetic peptide
GAATRAT

SEQ ID NO: 861 - protein, 7 aa, synthetic construct
  REGION 1..7: note = Description of Artificial Sequence: Synthetic peptide
GAATRAT

SEQ ID NO: 862 - protein, 7 aa, synthetic construct
  REGION 1..7: note = Description of Artificial Sequence: Synthetic peptide
GAATRAT

SEQ ID NO: 863 - protein, 7 aa, synthetic construct
  REGION 1..7: note = Description of Artificial Sequence: Synthetic peptide
GAATRAT

SEQ ID NO: 864 - protein, 7 aa, synthetic construct
  REGION 1..7: note = Description of Artificial Sequence: Synthetic peptide
GASSRAT

SEQ ID NO: 865 - protein, 7 aa, synthetic construct
  REGION 1..7: note = Description of Artificial Sequence: Synthetic peptide
GASSRAT

SEQ ID NO: 866 - protein, 7 aa, synthetic construct
  REGION 1..7: note = Description of Artificial Sequence: Synthetic peptide
GASSRAT

SEQ ID NO: 867 - protein, 7 aa, synthetic construct
  REGION 1..7: note = Description of Artificial Sequence: Synthetic peptide
GASSRAT

SEQ ID NO: 868 - protein, 7 aa, synthetic construct
  REGION 1..7: note = Description of Artificial Sequence: Synthetic peptide
GASSRAT

SEQ ID NO: 869 - protein, 7 aa, synthetic construct
  REGION 1..7: note = Description of Artificial Sequence: Synthetic peptide
GASSRAT

SEQ ID NO: 870 - protein, 7 aa, synthetic construct
  REGION 1..7: note = Description of Artificial Sequence: Synthetic peptide
GASSRAT

SEQ ID NO: 871 - protein, 7 aa, synthetic construct
  REGION 1..7: note = Description of Artificial Sequence: Synthetic peptide
WASTRES

SEQ ID NO: 872 - protein, 7 aa, synthetic construct
  REGION 1..7: note = Description of Artificial Sequence: Synthetic peptide
WASTRES

SEQ ID NO: 873 - protein, 7 aa, synthetic construct
  REGION 1..7: note = Description of Artificial Sequence: Synthetic peptide
WASTRES

SEQ ID NO: 874 - protein, 7 aa, synthetic construct
  REGION 1..7: note = Description of Artificial Sequence: Synthetic peptide
WASTRES

SEQ ID NO: 875 - protein, 7 aa, synthetic construct
  REGION 1..7: note = Description of Artificial Sequence: Synthetic peptide
WASTRES

SEQ ID NO: 876 - protein, 7 aa, synthetic construct
  REGION 1..7: note = Description of Artificial Sequence: Synthetic peptide
WASTRES

SEQ ID NO: 877 - protein, 7 aa, synthetic construct
  REGION 1..7: note = Description of Artificial Sequence: Synthetic peptide
WASTRES

SEQ ID NO: 878 - protein, 7 aa, synthetic construct
  REGION 1..7: note = Description of Artificial Sequence: Synthetic peptide
WASTRES

SEQ ID NO: 879 - protein, 7 aa, synthetic construct
  REGION 1..7: note = Description of Artificial Sequence: Synthetic peptide
WASTRES

SEQ ID NO: 880 - protein, 7 aa, synthetic construct
  REGION 1..7: note = Description of Artificial Sequence: Synthetic peptide
WASTRES

SEQ ID NO: 881 - protein, 7 aa, synthetic construct
  REGION 1..7: note = Description of Artificial Sequence: Synthetic peptide
WASTRES

SEQ ID NO: 882 - protein, 7 aa, synthetic construct
  REGION 1..7: note = Description of Artificial Sequence: Synthetic peptide
WTSTRES

SEQ ID NO: 883 - protein, 7 aa, synthetic construct
  REGION 1..7: note = Description of Artificial Sequence: Synthetic peptide
WTSTRES

SEQ ID NO: 884 - protein, 7 aa, synthetic construct
  REGION 1..7: note = Description of Artificial Sequence: Synthetic peptide
WTSTRDS

SEQ ID NO: 885 - protein, 7 aa, synthetic construct
  REGION 1..7: note = Description of Artificial Sequence: Synthetic peptide
WTSTRES

SEQ ID NO: 886 - protein, 7 aa, synthetic construct
  REGION 1..7: note = Description of Artificial Sequence: Synthetic peptide
WTSTRES

SEQ ID NO: 887 - protein, 7 aa, synthetic construct
  REGION 1..7: note = Description of Artificial Sequence: Synthetic peptide
WTSTRDS

SEQ ID NO: 888 - protein, 7 aa, synthetic construct
  REGION 1..7: note = Description of Artificial Sequence: Synthetic peptide
WTSTRDS

SEQ ID NO: 889 - protein, 7 aa, synthetic construct
  REGION 1..7: note = Description of Artificial Sequence: Synthetic peptide
WTSTRES

SEQ ID NO: 890 - protein, 7 aa, synthetic construct
  REGION 1..7: note = Description of Artificial Sequence: Synthetic peptide
WTSTRES

SEQ ID NO: 891 - protein, 7 aa, synthetic construct
  REGION 1..7: note = Description of Artificial Sequence: Synthetic peptide
WASTRES

SEQ ID NO: 892 - protein, 7 aa, synthetic construct
  REGION 1..7: note = Description of Artificial Sequence: Synthetic peptide
WASTRES

SEQ ID NO: 893 - protein, 7 aa, synthetic construct
  REGION 1..7: note = Description of Artificial Sequence: Synthetic peptide
WASTRES

SEQ ID NO: 894 - protein, 7 aa, synthetic construct
  REGION 1..7: note = Description of Artificial Sequence: Synthetic peptide
WASTRES

SEQ ID NO: 895 - protein, 7 aa, synthetic construct
  REGION 1..7: note = Description of Artificial Sequence: Synthetic peptide
WASTRES

SEQ ID NO: 896 - protein, 7 aa, synthetic construct
  REGION 1..7: note = Description of Artificial Sequence: Synthetic peptide
WTSTRDS

SEQ ID NO: 897 - protein, 7 aa, synthetic construct
  REGION 1..7: note = Description of Artificial Sequence: Synthetic peptide
WTSTRDS

SEQ ID NO: 898 - protein, 7 aa, synthetic construct
  REGION 1..7: note = Description of Artificial Sequence: Synthetic peptide
WTSTRDS

SEQ ID NO: 899 - protein, 7 aa, synthetic construct
  REGION 1..7: note = Description of Artificial Sequence: Synthetic peptide
WTSTRDS

SEQ ID NO: 900 - protein, 7 aa, synthetic construct
  REGION 1..7: note = Description of Artificial Sequence: Synthetic peptide
WTSTRDS

SEQ ID NO: 901 - protein, 7 aa, synthetic construct
  REGION 1..7: note = Description of Artificial Sequence: Synthetic peptide
WTSTRDS

SEQ ID NO: 902 - protein, 7 aa, synthetic construct
  REGION 1..7: note = Description of Artificial Sequence: Synthetic peptide
WTSTRDS

SEQ ID NO: 903 - protein, 7 aa, synthetic construct
  REGION 1..7: note = Description of Artificial Sequence: Synthetic peptide
WTSTRES

SEQ ID NO: 904 - protein, 7 aa, synthetic construct
  REGION 1..7: note = Description of Artificial Sequence: Synthetic peptide
WTSTRES

SEQ ID NO: 905 - protein, 7 aa, synthetic construct
  REGION 1..7: note = Description of Artificial Sequence: Synthetic peptide
WTSTRES

SEQ ID NO: 906 - protein, 7 aa, synthetic construct
  REGION 1..7: note = Description of Artificial Sequence: Synthetic peptide
WTSTRES

SEQ ID NO: 907 - protein, 7 aa, synthetic construct
  REGION 1..7: note = Description of Artificial Sequence: Synthetic peptide
WTSTRDS

SEQ ID NO: 908 - protein, 7 aa, synthetic construct
  REGION 1..7: note = Description of Artificial Sequence: Synthetic peptide
WTSTRES

SEQ ID NO: 909 - protein, 7 aa, synthetic construct
  REGION 1..7: note = Description of Artificial Sequence: Synthetic peptide
TNNQRPS

SEQ ID NO: 910 - protein, 7 aa, synthetic construct
  REGION 1..7: note = Description of Artificial Sequence: Synthetic peptide
TNNQRPS

SEQ ID NO: 911 - protein, 7 aa, synthetic construct
  REGION 1..7: note = Description of Artificial Sequence: Synthetic peptide
TNNQRPS

SEQ ID NO: 912 - protein, 7 aa, synthetic construct
  REGION 1..7: note = Description of Artificial Sequence: Synthetic peptide
TNNQRPS

SEQ ID NO: 913 - protein, 7 aa, synthetic construct
  REGION 1..7: note = Description of Artificial Sequence: Synthetic peptide
TNNQRPS

SEQ ID NO: 914 - protein, 7 aa, synthetic construct
  REGION 1..7: note = Description of Artificial Sequence: Synthetic peptide
TNNQRPS

SEQ ID NO: 915 - protein, 7 aa, synthetic construct
  REGION 1..7: note = Description of Artificial Sequence: Synthetic peptide
TNNQRPS

SEQ ID NO: 916 - protein, 7 aa, synthetic construct
  REGION 1..7: note = Description of Artificial Sequence: Synthetic peptide
TNNQRPS

SEQ ID NO: 917 - protein, 7 aa, synthetic construct
  REGION 1..7: note = Description of Artificial Sequence: Synthetic peptide
TNNQRPS

SEQ ID NO: 918 - protein, 7 aa, synthetic construct
  REGION 1..7: note = Description of Artificial Sequence: Synthetic peptide
TNNQRPS

SEQ ID NO: 919 - protein, 7 aa, synthetic construct
  REGION 1..7: note = Description of Artificial Sequence: Synthetic peptide
TNNQRPS

SEQ ID NO: 920 - protein, 7 aa, synthetic construct
  REGION 1..7: note = Description of Artificial Sequence: Synthetic peptide
TNNQRPS

SEQ ID NO: 921 - protein, 7 aa, synthetic construct
  REGION 1..7: note = Description of Artificial Sequence: Synthetic peptide
TNNQRPS

SEQ ID NO: 922 - protein, 7 aa, synthetic construct
  REGION 1..7: note = Description of Artificial Sequence: Synthetic peptide
TNNQRPS

SEQ ID NO: 923 - protein, 7 aa, synthetic construct
  REGION 1..7: note = Description of Artificial Sequence: Synthetic peptide
GASSLQS

SEQ ID NO: 924 - protein, 7 aa, synthetic construct
  REGION 1..7: note = Description of Artificial Sequence: Synthetic peptide
GASSLQS

SEQ ID NO: 925 - protein, 7 aa, synthetic construct
  REGION 1..7: note = Description of Artificial Sequence: Synthetic peptide
TNNQRPS

SEQ ID NO: 926 - protein, 7 aa, synthetic construct
  REGION 1..7: note = Description of Artificial Sequence: Synthetic peptide
VASSLQS

SEQ ID NO: 927 - protein, 7 aa, synthetic construct
  REGION 1..7: note = Description of Artificial Sequence: Synthetic peptide
DNNKRPS

SEQ ID NO: 928 - protein, 7 aa, synthetic construct
  REGION 1..7: note = Description of Artificial Sequence: Synthetic peptide
VASSLQS

SEQ ID NO: 929 - protein, 7 aa, synthetic construct
  REGION 1..7: note = Description of Artificial Sequence: Synthetic peptide
VASSLQS

SEQ ID NO: 930 - protein, 7 aa, synthetic construct
  REGION 1..7: note = Description of Artificial Sequence: Synthetic peptide
VASSLQS

SEQ ID NO: 931 - protein, 7 aa, synthetic construct
  REGION 1..7: note = Description of Artificial Sequence: Synthetic peptide
VASSLQS

SEQ ID NO: 932 - protein, 7 aa, synthetic construct
  REGION 1..7: note = Description of Artificial Sequence: Synthetic peptide
VASSLQS

SEQ ID NO: 933 - protein, 7 aa, synthetic construct
  REGION 1..7: note = Description of Artificial Sequence: Synthetic peptide
VASSLQS

SEQ ID NO: 934 - protein, 7 aa, synthetic construct
  REGION 1..7: note = Description of Artificial Sequence: Synthetic peptide
DNNKRPS

SEQ ID NO: 935 - protein, 7 aa, synthetic construct
  REGION 1..7: note = Description of Artificial Sequence: Synthetic peptide
DNNKRPS

SEQ ID NO: 936 - protein, 7 aa, synthetic construct
  REGION 1..7: note = Description of Artificial Sequence: Synthetic peptide
DNNKRPS

SEQ ID NO: 937 - protein, 7 aa, synthetic construct
  REGION 1..7: note = Description of Artificial Sequence: Synthetic peptide
DNNKRPS

SEQ ID NO: 938 - protein, 7 aa, synthetic construct
  REGION 1..7: note = Description of Artificial Sequence: Synthetic peptide
DNNKRPS

SEQ ID NO: 939 - protein, 7 aa, synthetic construct
  REGION 1..7: note = Description of Artificial Sequence: Synthetic peptide
DNNKRPS

SEQ ID NO: 940 - protein, 7 aa, synthetic construct
  REGION 1..7: note = Description of Artificial Sequence: Synthetic peptide
DNNKRPS

SEQ ID NO: 941 - protein, 7 aa, synthetic construct
  REGION 1..7: note = Description of Artificial Sequence: Synthetic peptide
DNNKRPS

SEQ ID NO: 942 - protein, 7 aa, synthetic construct
  REGION 1..7: note = Description of Artificial Sequence: Synthetic peptide
VASSLQS

SEQ ID NO: 943 - protein, 11 aa, synthetic construct
  REGION 1..11: note = Description of Artificial Sequence: Synthetic peptide
ATFDDSLNGPV

SEQ ID NO: 944 - protein, 9 aa, synthetic construct
  REGION 1..9: note = Description of Artificial Sequence: Synthetic peptide
LQHNNYPFT

SEQ ID NO: 945 - protein, 9 aa, synthetic construct
  REGION 1..9: note = Description of Artificial Sequence: Synthetic peptide
LQHNNYPFT

SEQ ID NO: 946 - protein, 8 aa, synthetic construct
  REGION 1..8: note = Description of Artificial Sequence: Synthetic peptide
QQYDILLT

SEQ ID NO: 947 - protein, 9 aa, synthetic construct
  REGION 1..9: note = Description of Artificial Sequence: Synthetic peptide
QQYYSTPWT

SEQ ID NO: 948 - protein, 9 aa, synthetic construct
  REGION 1..9: note = Description of Artificial Sequence: Synthetic peptide
QQYYSTPWT

SEQ ID NO: 949 - protein, 9 aa, synthetic construct
  REGION 1..9: note = Description of Artificial Sequence: Synthetic peptide
QQYYRTPWT

SEQ ID NO: 950 - protein, 9 aa, synthetic construct
  REGION 1..9: note = Description of Artificial Sequence: Synthetic peptide
QQYYRTPWT

SEQ ID NO: 951 - protein, 9 aa, synthetic construct
  REGION 1..9: note = Description of Artificial Sequence: Synthetic peptide
QQYGSSPLT

SEQ ID NO: 952 - protein, 9 aa, synthetic construct
  REGION 1..9: note = Description of Artificial Sequence: Synthetic peptide
QQYNNWPLT

SEQ ID NO: 953 - protein, 9 aa, synthetic construct
  REGION 1..9: note = Description of Artificial Sequence: Synthetic peptide
LQHNSYPFT

SEQ ID NO: 954 - protein, 8 aa, synthetic construct
  REGION 1..8: note = Description of Artificial Sequence: Synthetic peptide
QQYDDLFT

SEQ ID NO: 955 - protein, 9 aa, synthetic construct
  REGION 1..9: note = Description of Artificial Sequence: Synthetic peptide
QQTNSFPPT

SEQ ID NO: 956 - protein, 9 aa, synthetic construct
  REGION 1..9: note = Description of Artificial Sequence: Synthetic peptide
QQTNSFPPT

SEQ ID NO: 957 - protein, 9 aa, synthetic construct
  REGION 1..9: note = Description of Artificial Sequence: Synthetic peptide
LQHNSYPFT

SEQ ID NO: 958 - protein, 9 aa, synthetic construct
  REGION 1..9: note = Description of Artificial Sequence: Synthetic peptide
LQHNSYPFT

SEQ ID NO: 959 - protein, 9 aa, synthetic construct
  REGION 1..9: note = Description of Artificial Sequence: Synthetic peptide
LQHNSYPFT

SEQ ID NO: 960 - protein, 9 aa, synthetic construct
  REGION 1..9: note = Description of Artificial Sequence: Synthetic peptide
LQHNSYPFT

SEQ ID NO: 961 - protein, 9 aa, synthetic construct
  REGION 1..9: note = Description of Artificial Sequence: Synthetic peptide
LQHNSYPFT

SEQ ID NO: 962 - protein, 9 aa, synthetic construct
  REGION 1..9: note = Description of Artificial Sequence: Synthetic peptide
LQHNSYPFT

SEQ ID NO: 963 - protein, 9 aa, synthetic construct
  REGION 1..9: note = Description of Artificial Sequence: Synthetic peptide
LQHNNYPFT

SEQ ID NO: 964 - protein, 9 aa, synthetic construct
  REGION 1..9: note = Description of Artificial Sequence: Synthetic peptide
LQHNNYPFT

SEQ ID NO: 965 - protein, 9 aa, synthetic construct
  REGION 1..9: note = Description of Artificial Sequence: Synthetic peptide
LQHNNYPFT

SEQ ID NO: 966 - protein, 9 aa, synthetic construct
  REGION 1..9: note = Description of Artificial Sequence: Synthetic peptide
LQHNNYPFT

SEQ ID NO: 967 - protein, 9 aa, synthetic construct
  REGION 1..9: note = Description of Artificial Sequence: Synthetic peptide
LQHNNYPFT

SEQ ID NO: 968 - protein, 9 aa, synthetic construct
  REGION 1..9: note = Description of Artificial Sequence: Synthetic peptide
LQHNNYPFT

SEQ ID NO: 969 - protein, 9 aa, synthetic construct
  REGION 1..9: note = Description of Artificial Sequence: Synthetic peptide
LQHNNYPFT

SEQ ID NO: 970 - protein, 9 aa, synthetic construct
  REGION 1..9: note = Description of Artificial Sequence: Synthetic peptide
LQHNNYPFT

SEQ ID NO: 971 - protein, 9 aa, synthetic construct
  REGION 1..9: note = Description of Artificial Sequence: Synthetic peptide
LQHNNYPFT

SEQ ID NO: 972 - protein, 9 aa, synthetic construct
  REGION 1..9: note = Description of Artificial Sequence: Synthetic peptide
LQHNNYPFT

SEQ ID NO: 973 - protein, 9 aa, synthetic construct
  REGION 1..9: note = Description of Artificial Sequence: Synthetic peptide
LQHNNYPFT

SEQ ID NO: 974 - protein, 9 aa, synthetic construct
  REGION 1..9: note = Description of Artificial Sequence: Synthetic peptide
LQHNNYPFT

SEQ ID NO: 975 - protein, 9 aa, synthetic construct
  REGION 1..9: note = Description of Artificial Sequence: Synthetic peptide
LQHNNYPFT

SEQ ID NO: 976 - protein, 9 aa, synthetic construct
  REGION 1..9: note = Description of Artificial Sequence: Synthetic peptide
LQHNNYPFT

SEQ ID NO: 977 - protein, 9 aa, synthetic construct
  REGION 1..9: note = Description of Artificial Sequence: Synthetic peptide
LQHNNYPFT

SEQ ID NO: 978 - protein, 9 aa, synthetic construct
  REGION 1..9: note = Description of Artificial Sequence: Synthetic peptide
LQHNNYPFT

SEQ ID NO: 979 - protein, 9 aa, synthetic construct
  REGION 1..9: note = Description of Artificial Sequence: Synthetic peptide
LQHNNYPFT

SEQ ID NO: 980 - protein, 9 aa, synthetic construct
  REGION 1..9: note = Description of Artificial Sequence: Synthetic peptide
LQHNNYPFT

SEQ ID NO: 981 - protein, 9 aa, synthetic construct
  REGION 1..9: note = Description of Artificial Sequence: Synthetic peptide
LQHNNYPFT

SEQ ID NO: 982 - protein, 8 aa, synthetic construct
  REGION 1..8: note = Description of Artificial Sequence: Synthetic peptide
QQYDILLT

SEQ ID NO: 983 - protein, 8 aa, synthetic construct
  REGION 1..8: note = Description of Artificial Sequence: Synthetic peptide
QQYDILLT

SEQ ID NO: 984 - protein, 8 aa, synthetic construct
  REGION 1..8: note = Description of Artificial Sequence: Synthetic peptide
QQYDILLT

SEQ ID NO: 985 - protein, 8 aa, synthetic construct
  REGION 1..8: note = Description of Artificial Sequence: Synthetic peptide
QQYDILLT

SEQ ID NO: 986 - protein, 8 aa, synthetic construct
  REGION 1..8: note = Description of Artificial Sequence: Synthetic peptide
QQYDILLT

SEQ ID NO: 987 - protein, 8 aa, synthetic construct
  REGION 1..8: note = Description of Artificial Sequence: Synthetic peptide
QQYDILLT

SEQ ID NO: 988 - protein, 8 aa, synthetic construct
  REGION 1..8: note = Description of Artificial Sequence: Synthetic peptide
QQYDILLT

SEQ ID NO: 989 - protein, 8 aa, synthetic construct
  REGION 1..8: note = Description of Artificial Sequence: Synthetic peptide
QQYDILLT

SEQ ID NO: 990 - protein, 8 aa, synthetic construct
  REGION 1..8: note = Description of Artificial Sequence: Synthetic peptide
QQYDILLT

SEQ ID NO: 991 - protein, 9 aa, synthetic construct
  REGION 1..9: note = Description of Artificial Sequence: Synthetic peptide
LQHNNYPFT

SEQ ID NO: 992 - protein, 9 aa, synthetic construct
  REGION 1..9: note = Description of Artificial Sequence: Synthetic peptide
LQHNNYPFT

SEQ ID NO: 993 - protein, 9 aa, synthetic construct
  REGION 1..9: note = Description of Artificial Sequence: Synthetic peptide
LQHNNYPFT

SEQ ID NO: 994 - protein, 9 aa, synthetic construct
  REGION 1..9: note = Description of Artificial Sequence: Synthetic peptide
LQHNNYPFT

SEQ ID NO: 995 - protein, 9 aa, synthetic construct
  REGION 1..9: note = Description of Artificial Sequence: Synthetic peptide
LQHNNYPFT

SEQ ID NO: 996 - protein, 9 aa, synthetic construct
  REGION 1..9: note = Description of Artificial Sequence: Synthetic peptide
LQHNNYPFT

SEQ ID NO: 997 - protein, 9 aa, synthetic construct
  REGION 1..9: note = Description of Artificial Sequence: Synthetic peptide
LQHNNYPFT

SEQ ID NO: 998 - protein, 8 aa, synthetic construct
  REGION 1..8: note = Description of Artificial Sequence: Synthetic peptide
QQYDDLFT

SEQ ID NO: 999 - protein, 8 aa, synthetic construct
  REGION 1..8: note = Description of Artificial Sequence: Synthetic peptide
QQYDDLFT

SEQ ID NO: 1000 - protein, 8 aa, synthetic construct
  REGION 1..8: note = Description of Artificial Sequence: Synthetic peptide
QQYDDLFT

SEQ ID NO: 1001 - protein, 8 aa, synthetic construct
  REGION 1..8: note = Description of Artificial Sequence: Synthetic peptide
QQYDDLFT

SEQ ID NO: 1002 - protein, 8 aa, synthetic construct
  REGION 1..8: note = Description of Artificial Sequence: Synthetic peptide
QQYDDLFT

SEQ ID NO: 1003 - protein, 8 aa, synthetic construct
  REGION 1..8: note = Description of Artificial Sequence: Synthetic peptide
QQYDDLFT

SEQ ID NO: 1004 - protein, 8 aa, synthetic construct
  REGION 1..8: note = Description of Artificial Sequence: Synthetic peptide
QQYDDLFT

SEQ ID NO: 1005 - protein, 8 aa, synthetic construct
  REGION 1..8: note = Description of Artificial Sequence: Synthetic peptide
QQYDDLFT

SEQ ID NO: 1006 - protein, 8 aa, synthetic construct
  REGION 1..8: note = Description of Artificial Sequence: Synthetic peptide
QQYDDLFT

SEQ ID NO: 1007 - protein, 8 aa, synthetic construct
  REGION 1..8: note = Description of Artificial Sequence: Synthetic peptide
QQYDDLFT

SEQ ID NO: 1008 - protein, 8 aa, synthetic construct
  REGION 1..8: note = Description of Artificial Sequence: Synthetic peptide
QQYDDLFT

SEQ ID NO: 1009 - protein, 8 aa, synthetic construct
  REGION 1..8: note = Description of Artificial Sequence: Synthetic peptide
QQYGSSPR

SEQ ID NO: 1010 - protein, 8 aa, synthetic construct
  REGION 1..8: note = Description of Artificial Sequence: Synthetic peptide
QQYGSSPR

SEQ ID NO: 1011 - protein, 8 aa, synthetic construct
  REGION 1..8: note = Description of Artificial Sequence: Synthetic peptide
QQYGSSPR

SEQ ID NO: 1012 - protein, 8 aa, synthetic construct
  REGION 1..8: note = Description of Artificial Sequence: Synthetic peptide
QQYGSSPR

SEQ ID NO: 1013 - protein, 9 aa, synthetic construct
  REGION 1..9: note = Description of Artificial Sequence: Synthetic peptide
QQYNNWPLT

SEQ ID NO: 1014 - protein, 9 aa, synthetic construct
  REGION 1..9: note = Description of Artificial Sequence: Synthetic peptide
QQYNNWPLT

SEQ ID NO: 1015 - protein, 9 aa, synthetic construct
  REGION 1..9: note = Description of Artificial Sequence: Synthetic peptide
QQYNNWPLT

SEQ ID NO: 1016 - protein, 9 aa, synthetic construct
  REGION 1..9: note = Description of Artificial Sequence: Synthetic peptide
QQYNNWPLT

SEQ ID NO: 1017 - protein, 9 aa, synthetic construct
  REGION 1..9: note = Description of Artificial Sequence: Synthetic peptide
QQYNNFPLT

SEQ ID NO: 1018 - protein, 9 aa, synthetic construct
  REGION 1..9: note = Description of Artificial Sequence: Synthetic peptide
QQYNNYPLT

SEQ ID NO: 1019 - protein, 9 aa, synthetic construct
  REGION 1..9: note = Description of Artificial Sequence: Synthetic peptide
QQYNNWPLT

SEQ ID NO: 1020 - protein, 9 aa, synthetic construct
  REGION 1..9: note = Description of Artificial Sequence: Synthetic peptide
QQYNNWPLT

SEQ ID NO: 1021 - protein, 9 aa, synthetic construct
  REGION 1..9: note = Description of Artificial Sequence: Synthetic peptide
QQYGSSPLT

SEQ ID NO: 1022 - protein, 9 aa, synthetic construct
  REGION 1..9: note = Description of Artificial Sequence: Synthetic peptide
QQYGSSPLT

SEQ ID NO: 1023 - protein, 9 aa, synthetic construct
  REGION 1..9: note = Description of Artificial Sequence: Synthetic peptide
QQYGSSPLT

SEQ ID NO: 1024 - protein, 9 aa, synthetic construct
  REGION 1..9: note = Description of Artificial Sequence: Synthetic peptide
QQYGSSPLT

SEQ ID NO: 1025 - protein, 9 aa, synthetic construct
  REGION 1..9: note = Description of Artificial Sequence: Synthetic peptide
QQYGSSPLT

SEQ ID NO: 1026 - protein, 9 aa, synthetic construct
  REGION 1..9: note = Description of Artificial Sequence: Synthetic peptide
QQYGSSPLT

SEQ ID NO: 1027 - protein, 9 aa, synthetic construct
  REGION 1..9: note = Description of Artificial Sequence: Synthetic peptide
QQYGSSPLT

SEQ ID NO: 1028 - protein, 9 aa, synthetic construct
  REGION 1..9: note = Description of Artificial Sequence: Synthetic peptide
QQYYSTPWT

SEQ ID NO: 1029 - protein, 9 aa, synthetic construct
  REGION 1..9: note = Description of Artificial Sequence: Synthetic peptide
QQYYSTPWT

SEQ ID NO: 1030 - protein, 9 aa, synthetic construct
  REGION 1..9: note = Description of Artificial Sequence: Synthetic peptide
QQYYSTPWT

SEQ ID NO: 1031 - protein, 9 aa, synthetic construct
  REGION 1..9: note = Description of Artificial Sequence: Synthetic peptide
QQYYSTPWT

SEQ ID NO: 1032 - protein, 9 aa, synthetic construct
  REGION 1..9: note = Description of Artificial Sequence: Synthetic peptide
QQYYSTPWT

SEQ ID NO: 1033 - protein, 9 aa, synthetic construct
  REGION 1..9: note = Description of Artificial Sequence: Synthetic peptide
QQYYSTPWT

SEQ ID NO: 1034 - protein, 9 aa, synthetic construct
  REGION 1..9: note = Description of Artificial Sequence: Synthetic peptide
QQYYSTPWT

SEQ ID NO: 1035 - protein, 9 aa, synthetic construct
  REGION 1..9: note = Description of Artificial Sequence: Synthetic peptide
QQYYSTPWT

SEQ ID NO: 1036 - protein, 9 aa, synthetic construct
  REGION 1..9: note = Description of Artificial Sequence: Synthetic peptide
QQYYSTPWT

SEQ ID NO: 1037 - protein, 9 aa, synthetic construct
  REGION 1..9: note = Description of Artificial Sequence: Synthetic peptide
QQYYSTPWT

SEQ ID NO: 1038 - protein, 9 aa, synthetic construct
  REGION 1..9: note = Description of Artificial Sequence: Synthetic peptide
QQYYSTPWT

SEQ ID NO: 1039 - protein, 9 aa, synthetic construct
  REGION 1..9: note = Description of Artificial Sequence: Synthetic peptide
QQYYRTPWT

SEQ ID NO: 1040 - protein, 9 aa, synthetic construct
  REGION 1..9: note = Description of Artificial Sequence: Synthetic peptide
QQYYRTPWT

SEQ ID NO: 1041 - protein, 9 aa, synthetic construct
  REGION 1..9: note = Description of Artificial Sequence: Synthetic peptide
QQYYRTPWT

SEQ ID NO: 1042 - protein, 9 aa, synthetic construct
  REGION 1..9: note = Description of Artificial Sequence: Synthetic peptide
QQYYRTPWT

SEQ ID NO: 1043 - protein, 9 aa, synthetic construct
  REGION 1..9: note = Description of Artificial Sequence: Synthetic peptide
QQYYRTPWT

SEQ ID NO: 1044 - protein, 9 aa, synthetic construct
  REGION 1..9: note = Description of Artificial Sequence: Synthetic peptide
QQYYRTPWT

SEQ ID NO: 1045 - protein, 9 aa, synthetic construct
  REGION 1..9: note = Description of Artificial Sequence: Synthetic peptide
QQYYRTPWT

SEQ ID NO: 1046 - protein, 9 aa, synthetic construct
  REGION 1..9: note = Description of Artificial Sequence: Synthetic peptide
QQYYRTPWT

SEQ ID NO: 1047 - protein, 9 aa, synthetic construct
  REGION 1..9: note = Description of Artificial Sequence: Synthetic peptide
QQYYRTPWT

SEQ ID NO: 1048 - protein, 9 aa, synthetic construct
  REGION 1..9: note = Description of Artificial Sequence: Synthetic peptide
QQYYSTPWT

SEQ ID NO: 1049 - protein, 9 aa, synthetic construct
  REGION 1..9: note = Description of Artificial Sequence: Synthetic peptide
QQYYSTPWT

SEQ ID NO: 1050 - protein, 9 aa, synthetic construct
  REGION 1..9: note = Description of Artificial Sequence: Synthetic peptide
QQYYSTPWT

SEQ ID NO: 1051 - protein, 9 aa, synthetic construct
  REGION 1..9: note = Description of Artificial Sequence: Synthetic peptide
QQYYSTPWT

SEQ ID NO: 1052 - protein, 9 aa, synthetic construct
  REGION 1..9: note = Description of Artificial Sequence: Synthetic peptide
QQYYSTPWT

SEQ ID NO: 1053 - protein, 9 aa, synthetic construct
  REGION 1..9: note = Description of Artificial Sequence: Synthetic peptide
QQYYRTPWT

SEQ ID NO: 1054 - protein, 9 aa, synthetic construct
  REGION 1..9: note = Description of Artificial Sequence: Synthetic peptide
QQYYRTPWT

SEQ ID NO: 1055 - protein, 9 aa, synthetic construct
  REGION 1..9: note = Description of Artificial Sequence: Synthetic peptide
QQYYRTPWT

SEQ ID NO: 1056 - protein, 9 aa, synthetic construct
  REGION 1..9: note = Description of Artificial Sequence: Synthetic peptide
QQYYRTPWT

SEQ ID NO: 1057 - protein, 9 aa, synthetic construct
  REGION 1..9: note = Description of Artificial Sequence: Synthetic peptide
QQYYRTPWT

SEQ ID NO: 1058 - protein, 9 aa, synthetic construct
  REGION 1..9: note = Description of Artificial Sequence: Synthetic peptide
QQYYRTPWT

SEQ ID NO: 1059 - protein, 9 aa, synthetic construct
  REGION 1..9: note = Description of Artificial Sequence: Synthetic peptide
QQYYRTPWT

SEQ ID NO: 1060 - protein, 9 aa, synthetic construct
  REGION 1..9: note = Description of Artificial Sequence: Synthetic peptide
QQYYRTPWT

SEQ ID NO: 1061 - protein, 9 aa, synthetic construct
  REGION 1..9: note = Description of Artificial Sequence: Synthetic peptide
QQYYRTPWT

SEQ ID NO: 1062 - protein, 9 aa, synthetic construct
  REGION 1..9: note = Description of Artificial Sequence: Synthetic peptide
QQYYRTPWT

SEQ ID NO: 1063 - protein, 9 aa, synthetic construct
  REGION 1..9: note = Description of Artificial Sequence: Synthetic peptide
QQYYRTPWT

SEQ ID NO: 1064 - protein, 9 aa, synthetic construct
  REGION 1..9: note = Description of Artificial Sequence: Synthetic peptide
QQYYRTPWT

SEQ ID NO: 1065 - protein, 9 aa, synthetic construct
  REGION 1..9: note = Description of Artificial Sequence: Synthetic peptide
QQYYRTPWT

SEQ ID NO: 1066 - protein, 11 aa, synthetic construct
  REGION 1..11: note = Description of Artificial Sequence: Synthetic peptide
ATFDESLSGPV

SEQ ID NO: 1067 - protein, 11 aa, synthetic construct
  REGION 1..11: note = Description of Artificial Sequence: Synthetic peptide
ATFDESLQGPV

SEQ ID NO: 1068 - protein, 11 aa, synthetic construct
  REGION 1..11: note = Description of Artificial Sequence: Synthetic peptide
ATFDESLSGPV

SEQ ID NO: 1069 - protein, 11 aa, synthetic construct
  REGION 1..11: note = Description of Artificial Sequence: Synthetic peptide
ATFDESLQGPV

SEQ ID NO: 1070 - protein, 11 aa, synthetic construct
  REGION 1..11: note = Description of Artificial Sequence: Synthetic peptide
ATFDDSLNGPV

SEQ ID NO: 1071 - protein, 11 aa, synthetic construct
  REGION 1..11: note = Description of Artificial Sequence: Synthetic peptide
ATFDDSLNGPV

SEQ ID NO: 1072 - protein, 11 aa, synthetic construct
  REGION 1..11: note = Description of Artificial Sequence: Synthetic peptide
ATFDESLNGPV

SEQ ID NO: 1073 - protein, 11 aa, synthetic construct
  REGION 1..11: note = Description of Artificial Sequence: Synthetic peptide
ATFDDSLQGPV

SEQ ID NO: 1074 - protein, 11 aa, synthetic construct
  REGION 1..11: note = Description of Artificial Sequence: Synthetic peptide
ATFDDSLSGPV

SEQ ID NO: 1075 - protein, 11 aa, synthetic construct
  REGION 1..11: note = Description of Artificial Sequence: Synthetic peptide
ATFDDSLNAPV

SEQ ID NO: 1076 - protein, 11 aa, synthetic construct
  REGION 1..11: note = Description of Artificial Sequence: Synthetic peptide
ATFDSSLNGPV

SEQ ID NO: 1077 - protein, 11 aa, synthetic construct
  REGION 1..11: note = Description of Artificial Sequence: Synthetic peptide
ATFDSSLNAPV

SEQ ID NO: 1078 - protein, 11 aa, synthetic construct
  REGION 1..11: note = Description of Artificial Sequence: Synthetic peptide
ATFDSSLNAPV

SEQ ID NO: 1079 - protein, 11 aa, synthetic construct
  REGION 1..11: note = Description of Artificial Sequence: Synthetic peptide
ATFDESLSGPV

SEQ ID NO: 1080 - protein, 9 aa, synthetic construct
  REGION 1..9: note = Description of Artificial Sequence: Synthetic peptide
LQHNNYPFT

SEQ ID NO: 1081 - protein, 9 aa, synthetic construct
  REGION 1..9: note = Description of Artificial Sequence: Synthetic peptide
LQHNNYPFT

SEQ ID NO: 1082 - protein, 11 aa, synthetic construct
  REGION 1..11: note = Description of Artificial Sequence: Synthetic peptide
ATFDSSLSGPV

SEQ ID NO: 1083 - protein, 9 aa, synthetic construct
  REGION 1..9: note = Description of Artificial Sequence: Synthetic peptide
QQSYSTLIS

SEQ ID NO: 1084 - protein, 11 aa, synthetic construct
  REGION 1..11: note = Description of Artificial Sequence: Synthetic peptide
GTWDSSLSAVV

SEQ ID NO: 1085 - protein, 9 aa, synthetic construct
  REGION 1..9: note = Description of Artificial Sequence: Synthetic peptide
QQSYSTLIS

SEQ ID NO: 1086 - protein, 9 aa, synthetic construct
  REGION 1..9: note = Description of Artificial Sequence: Synthetic peptide
QQSYSTLIS

SEQ ID NO: 1087 - protein, 9 aa, synthetic construct
  REGION 1..9: note = Description of Artificial Sequence: Synthetic peptide
QQSYSTLIS

SEQ ID NO: 1088 - protein, 9 aa, synthetic construct
  REGION 1..9: note = Description of Artificial Sequence: Synthetic peptide
QQSYSTLIS

SEQ ID NO: 1089 - protein, 9 aa, synthetic construct
  REGION 1..9: note = Description of Artificial Sequence: Synthetic peptide
QQSYSTLIS

SEQ ID NO: 1090 - protein, 9 aa, synthetic construct
  REGION 1..9: note = Description of Artificial Sequence: Synthetic peptide
QQSYSTLIS

SEQ ID NO: 1091 - protein, 11 aa, synthetic construct
  REGION 1..11: note = Description of Artificial Sequence: Synthetic peptide
GTWDSSLSAVV

SEQ ID NO: 1092 - protein, 11 aa, synthetic construct
  REGION 1..11: note = Description of Artificial Sequence: Synthetic peptide
GTWDSSLSAVV

SEQ ID NO: 1093 - protein, 11 aa, synthetic construct
  REGION 1..11: note = Description of Artificial Sequence: Synthetic peptide
GTWDSSLSAVV

SEQ ID NO: 1094 - protein, 11 aa, synthetic construct
  REGION 1..11: note = Description of Artificial Sequence: Synthetic peptide
GTFESSLSAVV

SEQ ID NO: 1095 - protein, 11 aa, synthetic construct
  REGION 1..11: note = Description of Artificial Sequence: Synthetic peptide
GTWDSSLSAVV

SEQ ID NO: 1096 - protein, 11 aa, synthetic construct
  REGION 1..11: note = Description of Artificial Sequence: Synthetic peptide
GTWDSSLSAVV

SEQ ID NO: 1097 - protein, 11 aa, synthetic construct
  REGION 1..11: note = Description of Artificial Sequence: Synthetic peptide
GTWDSSLSAVV

SEQ ID NO: 1098 - protein, 11 aa, synthetic construct
  REGION 1..11: note = Description of Artificial Sequence: Synthetic peptide
GTFESSLSAVV

SEQ ID NO: 1099 - protein, 9 aa, synthetic construct
  REGION 1..9: note = Description of Artificial Sequence: Synthetic peptide
QQSYSTLLS

SEQ ID NO: 1100 - protein, 5 aa, synthetic construct
  REGION 1..5: note = Description of Artificial Sequence: Synthetic peptide
GYYMH

SEQ ID NO: 1101 - protein, 5 aa, synthetic construct
  REGION 1..5: note = Description of Artificial Sequence: Synthetic peptide
NFGMH

SEQ ID NO: 1102 - protein, 5 aa, synthetic construct
  REGION 1..5: note = Description of Artificial Sequence: Synthetic peptide
YFGMH

SEQ ID NO: 1103 - protein, 5 aa, synthetic construct
  REGION 1..5: note = Description of Artificial Sequence: Synthetic peptide
SYGMH

SEQ ID NO: 1104 - protein, 5 aa, synthetic construct
  REGION 1..5: note = Description of Artificial Sequence: Synthetic peptide
GYYIH

SEQ ID NO: 1105 - protein, 5 aa, synthetic construct
  REGION 1..5: note = Description of Artificial Sequence: Synthetic peptide
GYYIH

SEQ ID NO: 1106 - protein, 5 aa, synthetic construct
  REGION 1..5: note = Description of Artificial Sequence: Synthetic peptide
GYYIH

SEQ ID NO: 1107 - protein, 5 aa, synthetic construct
  REGION 1..5: note = Description of Artificial Sequence: Synthetic peptide
GYYIH

SEQ ID NO: 1108 - protein, 7 aa, synthetic construct
  REGION 1..7: note = Description of Artificial Sequence: Synthetic peptide
SGGYYWS

SEQ ID NO: 1109 - protein, 5 aa, synthetic construct
  REGION 1..5: note = Description of Artificial Sequence: Synthetic peptide
NYGMH

SEQ ID NO: 1110 - protein, 5 aa, synthetic construct
  REGION 1..5: note = Description of Artificial Sequence: Synthetic peptide
YFGMH

SEQ ID NO: 1111 - protein, 5 aa, synthetic construct
  REGION 1..5: note = Description of Artificial Sequence: Synthetic peptide
SYGMH

SEQ ID NO: 1112 - protein, 5 aa, synthetic construct
  REGION 1..5: note = Description of Artificial Sequence: Synthetic peptide
SYYWS

SEQ ID NO: 1113 - protein, 5 aa, synthetic construct
  REGION 1..5: note = Description of Artificial Sequence: Synthetic peptide
SYYWS

SEQ ID NO: 1114 - protein, 5 aa, synthetic construct
  REGION 1..5: note = Description of Artificial Sequence: Synthetic peptide
YFGMH

SEQ ID NO: 1115 - protein, 5 aa, synthetic construct
  REGION 1..5: note = Description of Artificial Sequence: Synthetic peptide
YFGMH

SEQ ID NO: 1116 - protein, 5 aa, synthetic construct
  REGION 1..5: note = Description of Artificial Sequence: Synthetic peptide
YFGMH

SEQ ID NO: 1117 - protein, 5 aa, synthetic construct
  REGION 1..5: note = Description of Artificial Sequence: Synthetic peptide
YFGMH

SEQ ID NO: 1118 - protein, 5 aa, synthetic construct
  REGION 1..5: note = Description of Artificial Sequence: Synthetic peptide
YFGMH

SEQ ID NO: 1119 - protein, 5 aa, synthetic construct
  REGION 1..5: note = Description of Artificial Sequence: Synthetic peptide
YFGMH

SEQ ID NO: 1120 - protein, 5 aa, synthetic construct
  REGION 1..5: note = Description of Artificial Sequence: Synthetic peptide
NFGMH

SEQ ID NO: 1121 - protein, 5 aa, synthetic construct
  REGION 1..5: note = Description of Artificial Sequence: Synthetic peptide
NFGMH

SEQ ID NO: 1122 - protein, 5 aa, synthetic construct
  REGION 1..5: note = Description of Artificial Sequence: Synthetic peptide
NFGMH

SEQ ID NO: 1123 - protein, 5 aa, synthetic construct
  REGION 1..5: note = Description of Artificial Sequence: Synthetic peptide
NFGMH

SEQ ID NO: 1124 - protein, 5 aa, synthetic construct
  REGION 1..5: note = Description of Artificial Sequence: Synthetic peptide
NFGMH

SEQ ID NO: 1125 - protein, 5 aa, synthetic construct
  REGION 1..5: note = Description of Artificial Sequence: Synthetic peptide
NFGMH

SEQ ID NO: 1126 - protein, 5 aa, synthetic construct
  REGION 1..5: note = Description of Artificial Sequence: Synthetic peptide
NFGMH

SEQ ID NO: 1127 - protein, 5 aa, synthetic construct
  REGION 1..5: note = Description of Artificial Sequence: Synthetic peptide
NFGMH

SEQ ID NO: 1128 - protein, 5 aa, synthetic construct
  REGION 1..5: note = Description of Artificial Sequence: Synthetic peptide
NFGMH

SEQ ID NO: 1129 - protein, 5 aa, synthetic construct
  REGION 1..5: note = Description of Artificial Sequence: Synthetic peptide
NFGMH

SEQ ID NO: 1130 - protein, 5 aa, synthetic construct
  REGION 1..5: note = Description of Artificial Sequence: Synthetic peptide
NFGMH

SEQ ID NO: 1131 - protein, 5 aa, synthetic construct
  REGION 1..5: note = Description of Artificial Sequence: Synthetic peptide
NFGMH

SEQ ID NO: 1132 - protein, 5 aa, synthetic construct
  REGION 1..5: note = Description of Artificial Sequence: Synthetic peptide
NFGMH

SEQ ID NO: 1133 - protein, 5 aa, synthetic construct
  REGION 1..5: note = Description of Artificial Sequence: Synthetic peptide
NFGMH

SEQ ID NO: 1134 - protein, 5 aa, synthetic construct
  REGION 1..5: note = Description of Artificial Sequence: Synthetic peptide
NFGMH

SEQ ID NO: 1135 - protein, 5 aa, synthetic construct
  REGION 1..5: note = Description of Artificial Sequence: Synthetic peptide
NFGMH

SEQ ID NO: 1136 - protein, 5 aa, synthetic construct
  REGION 1..5: note = Description of Artificial Sequence: Synthetic peptide
NFGMH

SEQ ID NO: 1137 - protein, 5 aa, synthetic construct
  REGION 1..5: note = Description of Artificial Sequence: Synthetic peptide
NFGMH

SEQ ID NO: 1138 - protein, 5 aa, synthetic construct
  REGION 1..5: note = Description of Artificial Sequence: Synthetic peptide
NFGMH

SEQ ID NO: 1139 - protein, 5 aa, synthetic construct
  REGION 1..5: note = Description of Artificial Sequence: Synthetic peptide
SYGMH

SEQ ID NO: 1140 - protein, 5 aa, synthetic construct
  REGION 1..5: note = Description of Artificial Sequence: Synthetic peptide
SYGMH

SEQ ID NO: 1141 - protein, 5 aa, synthetic construct
  REGION 1..5: note = Description of Artificial Sequence: Synthetic peptide
SYGMH

SEQ ID NO: 1142 - protein, 5 aa, synthetic construct
  REGION 1..5: note = Description of Artificial Sequence: Synthetic peptide
SYGMH

SEQ ID NO: 1143 - protein, 5 aa, synthetic construct
  REGION 1..5: note = Description of Artificial Sequence: Synthetic peptide
SYGMH

SEQ ID NO: 1144 - protein, 5 aa, synthetic construct
  REGION 1..5: note = Description of Artificial Sequence: Synthetic peptide
SYGMH

SEQ ID NO: 1145 - protein, 5 aa, synthetic construct
  REGION 1..5: note = Description of Artificial Sequence: Synthetic peptide
SYGMH

SEQ ID NO: 1146 - protein, 5 aa, synthetic construct
  REGION 1..5: note = Description of Artificial Sequence: Synthetic peptide
SYGMH

SEQ ID NO: 1147 - protein, 5 aa, synthetic construct
  REGION 1..5: note = Description of Artificial Sequence: Synthetic peptide
SYGMH

SEQ ID NO: 1148 - protein, 5 aa, synthetic construct
  REGION 1..5: note = Description of Artificial Sequence: Synthetic peptide
YFGMH

SEQ ID NO: 1149 - protein, 5 aa, synthetic construct
  REGION 1..5: note = Description of Artificial Sequence: Synthetic peptide
YFGMH

SEQ ID NO: 1150 - protein, 5 aa, synthetic construct
  REGION 1..5: note = Description of Artificial Sequence: Synthetic peptide
YFGMH

SEQ ID NO: 1151 - protein, 5 aa, synthetic construct
  REGION 1..5: note = Description of Artificial Sequence: Synthetic peptide
YFGMH

SEQ ID NO: 1152 - protein, 5 aa, synthetic construct
  REGION 1..5: note = Description of Artificial Sequence: Synthetic peptide
YFGMH

SEQ ID NO: 1153 - protein, 5 aa, synthetic construct
  REGION 1..5: note = Description of Artificial Sequence: Synthetic peptide
YFGMH

SEQ ID NO: 1154 - protein, 5 aa, synthetic construct
  REGION 1..5: note = Description of Artificial Sequence: Synthetic peptide
YFGMH

SEQ ID NO: 1155 - protein, 5 aa, synthetic construct
  REGION 1..5: note = Description of Artificial Sequence: Synthetic peptide
SYGMH

SEQ ID NO: 1156 - protein, 5 aa, synthetic construct
  REGION 1..5: note = Description of Artificial Sequence: Synthetic peptide
SYGMH

SEQ ID NO: 1157 - protein, 5 aa, synthetic construct
  REGION 1..5: note = Description of Artificial Sequence: Synthetic peptide
SYGMH

SEQ ID NO: 1158 - protein, 5 aa, synthetic construct
  REGION 1..5: note = Description of Artificial Sequence: Synthetic peptide
SYGMH

SEQ ID NO: 1159 - protein, 5 aa, synthetic construct
  REGION 1..5: note = Description of Artificial Sequence: Synthetic peptide
SYGMH

SEQ ID NO: 1160 - protein, 5 aa, synthetic construct
  REGION 1..5: note = Description of Artificial Sequence: Synthetic peptide
SYGMH

SEQ ID NO: 1161 - protein, 5 aa, synthetic construct
  REGION 1..5: note = Description of Artificial Sequence: Synthetic peptide
SYGMH

SEQ ID NO: 1162 - protein, 5 aa, synthetic construct
  REGION 1..5: note = Description of Artificial Sequence: Synthetic peptide
SYGMH

SEQ ID NO: 1163 - protein, 5 aa, synthetic construct
  REGION 1..5: note = Description of Artificial Sequence: Synthetic peptide
SYGMH

SEQ ID NO: 1164 - protein, 5 aa, synthetic construct
  REGION 1..5: note = Description of Artificial Sequence: Synthetic peptide
SYGMH

SEQ ID NO: 1165 - protein, 5 aa, synthetic construct
  REGION 1..5: note = Description of Artificial Sequence: Synthetic peptide
SYGMH

SEQ ID NO: 1166 - protein, 5 aa, synthetic construct
  REGION 1..5: note = Description of Artificial Sequence: Synthetic peptide
SYGMH

SEQ ID NO: 1167 - protein, 5 aa, synthetic construct
  REGION 1..5: note = Description of Artificial Sequence: Synthetic peptide
SYGMH

SEQ ID NO: 1168 - protein, 5 aa, synthetic construct
  REGION 1..5: note = Description of Artificial Sequence: Synthetic peptide
SYGMH

SEQ ID NO: 1169 - protein, 5 aa, synthetic construct
  REGION 1..5: note = Description of Artificial Sequence: Synthetic peptide
SYGMH

SEQ ID NO: 1170 - protein, 5 aa, synthetic construct
  REGION 1..5: note = Description of Artificial Sequence: Synthetic peptide
NYGMH

SEQ ID NO: 1171 - protein, 5 aa, synthetic construct
  REGION 1..5: note = Description of Artificial Sequence: Synthetic peptide
NYGMH

SEQ ID NO: 1172 - protein, 5 aa, synthetic construct
  REGION 1..5: note = Description of Artificial Sequence: Synthetic peptide
NYGMH

SEQ ID NO: 1173 - protein, 5 aa, synthetic construct
  REGION 1..5: note = Description of Artificial Sequence: Synthetic peptide
NYGMH

SEQ ID NO: 1174 - protein, 5 aa, synthetic construct
  REGION 1..5: note = Description of Artificial Sequence: Synthetic peptide
NYGMH

SEQ ID NO: 1175 - protein, 5 aa, synthetic construct
  REGION 1..5: note = Description of Artificial Sequence: Synthetic peptide
NYGMH

SEQ ID NO: 1176 - protein, 5 aa, synthetic construct
  REGION 1..5: note = Description of Artificial Sequence: Synthetic peptide
NYGMH

SEQ ID NO: 1177 - protein, 5 aa, synthetic construct
  REGION 1..5: note = Description of Artificial Sequence: Synthetic peptide
NYGMH

SEQ ID NO: 1178 - protein, 7 aa, synthetic construct
  REGION 1..7: note = Description of Artificial Sequence: Synthetic peptide
SGGYYWS

SEQ ID NO: 1179 - protein, 7 aa, synthetic construct
  REGION 1..7: note = Description of Artificial Sequence: Synthetic peptide
SGGYYWS

SEQ ID NO: 1180 - protein, 7 aa, synthetic construct
  REGION 1..7: note = Description of Artificial Sequence: Synthetic peptide
SGGYYWS

SEQ ID NO: 1181 - protein, 7 aa, synthetic construct
  REGION 1..7: note = Description of Artificial Sequence: Synthetic peptide
SGGYYWS

SEQ ID NO: 1182 - protein, 7 aa, synthetic construct
  REGION 1..7: note = Description of Artificial Sequence: Synthetic peptide
SGGYYWS

SEQ ID NO: 1183 - protein, 7 aa, synthetic construct
  REGION 1..7: note = Description of Artificial Sequence: Synthetic peptide
SGGYYWS

SEQ ID NO: 1184 - protein, 7 aa, synthetic construct
  REGION 1..7: note = Description of Artificial Sequence: Synthetic peptide
SGGYYWS

SEQ ID NO: 1185 - protein, 5 aa, synthetic construct
  REGION 1..5: note = Description of Artificial Sequence: Synthetic peptide
GYYIH

SEQ ID NO: 1186 - protein, 5 aa, synthetic construct
  REGION 1..5: note = Description of Artificial Sequence: Synthetic peptide
GYYIH

SEQ ID NO: 1187 - protein, 5 aa, synthetic construct
  REGION 1..5: note = Description of Artificial Sequence: Synthetic peptide
GYYIH

SEQ ID NO: 1188 - protein, 5 aa, synthetic construct
  REGION 1..5: note = Description of Artificial Sequence: Synthetic peptide
GYYIH

SEQ ID NO: 1189 - protein, 5 aa, synthetic construct
  REGION 1..5: note = Description of Artificial Sequence: Synthetic peptide
GYYIH

SEQ ID NO: 1190 - protein, 5 aa, synthetic construct
  REGION 1..5: note = Description of Artificial Sequence: Synthetic peptide
GYYIH

SEQ ID NO: 1191 - protein, 5 aa, synthetic construct
  REGION 1..5: note = Description of Artificial Sequence: Synthetic peptide
GYYIH

SEQ ID NO: 1192 - protein, 5 aa, synthetic construct
  REGION 1..5: note = Description of Artificial Sequence: Synthetic peptide
GYYIH

SEQ ID NO: 1193 - protein, 5 aa, synthetic construct
  REGION 1..5: note = Description of Artificial Sequence: Synthetic peptide
GYYIH

SEQ ID NO: 1194 - protein, 5 aa, synthetic construct
  REGION 1..5: note = Description of Artificial Sequence: Synthetic peptide
GYYIH

SEQ ID NO: 1195 - protein, 5 aa, synthetic construct
  REGION 1..5: note = Description of Artificial Sequence: Synthetic peptide
GYYIH

SEQ ID NO: 1196 - protein, 5 aa, synthetic construct
  REGION 1..5: note = Description of Artificial Sequence: Synthetic peptide
GYYIH

SEQ ID NO: 1197 - protein, 5 aa, synthetic construct
  REGION 1..5: note = Description of Artificial Sequence: Synthetic peptide
GYYIH

SEQ ID NO: 1198 - protein, 5 aa, synthetic construct
  REGION 1..5: note = Description of Artificial Sequence: Synthetic peptide
GYYIH

SEQ ID NO: 1199 - protein, 5 aa, synthetic construct
  REGION 1..5: note = Description of Artificial Sequence: Synthetic peptide
GYYIH

SEQ ID NO: 1200 - protein, 5 aa, synthetic construct
  REGION 1..5: note = Description of Artificial Sequence: Synthetic peptide
GYYIH

SEQ ID NO: 1201 - protein, 5 aa, synthetic construct
  REGION 1..5: note = Description of Artificial Sequence: Synthetic peptide
GYYIH

SEQ ID NO: 1202 - protein, 5 aa, synthetic construct
  REGION 1..5: note = Description of Artificial Sequence: Synthetic peptide
GYYIH

SEQ ID NO: 1203 - protein, 5 aa, synthetic construct
  REGION 1..5: note = Description of Artificial Sequence: Synthetic peptide
GYYIH

SEQ ID NO: 1204 - protein, 5 aa, synthetic construct
  REGION 1..5: note = Description of Artificial Sequence: Synthetic peptide
GYYIH

SEQ ID NO: 1205 - protein, 5 aa, synthetic construct
  REGION 1..5: note = Description of Artificial Sequence: Synthetic peptide
GYYIH

SEQ ID NO: 1206 - protein, 5 aa, synthetic construct
  REGION 1..5: note = Description of Artificial Sequence: Synthetic peptide
GYYIH

SEQ ID NO: 1207 - protein, 5 aa, synthetic construct
  REGION 1..5: note = Description of Artificial Sequence: Synthetic peptide
GYYIH

SEQ ID NO: 1208 - protein, 5 aa, synthetic construct
  REGION 1..5: note = Description of Artificial Sequence: Synthetic peptide
GYYIH

SEQ ID NO: 1209 - protein, 5 aa, synthetic construct
  REGION 1..5: note = Description of Artificial Sequence: Synthetic peptide
GYYIH

SEQ ID NO: 1210 - protein, 5 aa, synthetic construct
  REGION 1..5: note = Description of Artificial Sequence: Synthetic peptide
GYYIH

SEQ ID NO: 1211 - protein, 5 aa, synthetic construct
  REGION 1..5: note = Description of Artificial Sequence: Synthetic peptide
GYYIH

SEQ ID NO: 1212 - protein, 5 aa, synthetic construct
  REGION 1..5: note = Description of Artificial Sequence: Synthetic peptide
GYYIH

SEQ ID NO: 1213 - protein, 5 aa, synthetic construct
  REGION 1..5: note = Description of Artificial Sequence: Synthetic peptide
GYYIH

SEQ ID NO: 1214 - protein, 5 aa, synthetic construct
  REGION 1..5: note = Description of Artificial Sequence: Synthetic peptide
GYYIH

SEQ ID NO: 1215 - protein, 5 aa, synthetic construct
  REGION 1..5: note = Description of Artificial Sequence: Synthetic peptide
GYYIH

SEQ ID NO: 1216 - protein, 5 aa, synthetic construct
  REGION 1..5: note = Description of Artificial Sequence: Synthetic peptide
GYYIH

SEQ ID NO: 1217 - protein, 5 aa, synthetic construct
  REGION 1..5: note = Description of Artificial Sequence: Synthetic peptide
GYYIH

SEQ ID NO: 1218 - protein, 5 aa, synthetic construct
  REGION 1..5: note = Description of Artificial Sequence: Synthetic peptide
GYYIH

SEQ ID NO: 1219 - protein, 5 aa, synthetic construct
  REGION 1..5: note = Description of Artificial Sequence: Synthetic peptide
GYYIH

SEQ ID NO: 1220 - protein, 5 aa, synthetic construct
  REGION 1..5: note = Description of Artificial Sequence: Synthetic peptide
GYYIH

SEQ ID NO: 1221 - protein, 5 aa, synthetic construct
  REGION 1..5: note = Description of Artificial Sequence: Synthetic peptide
GYYIH

SEQ ID NO: 1222 - protein, 5 aa, synthetic construct
  REGION 1..5: note = Description of Artificial Sequence: Synthetic peptide
GYYIH

SEQ ID NO: 1223 - protein, 5 aa, synthetic construct
  REGION 1..5: note = Description of Artificial Sequence: Synthetic peptide
GYYMH

SEQ ID NO: 1224 - protein, 5 aa, synthetic construct
  REGION 1..5: note = Description of Artificial Sequence: Synthetic peptide
GYYMH

SEQ ID NO: 1225 - protein, 5 aa, synthetic construct
  REGION 1..5: note = Description of Artificial Sequence: Synthetic peptide
GYYMH

SEQ ID NO: 1226 - protein, 5 aa, synthetic construct
  REGION 1..5: note = Description of Artificial Sequence: Synthetic peptide
GYYMH

SEQ ID NO: 1227 - protein, 5 aa, synthetic construct
  REGION 1..5: note = Description of Artificial Sequence: Synthetic peptide
GYYMH

SEQ ID NO: 1228 - protein, 5 aa, synthetic construct
  REGION 1..5: note = Description of Artificial Sequence: Synthetic peptide
GYYMH

SEQ ID NO: 1229 - protein, 5 aa, synthetic construct
  REGION 1..5: note = Description of Artificial Sequence: Synthetic peptide
GYYMH

SEQ ID NO: 1230 - protein, 5 aa, synthetic construct
  REGION 1..5: note = Description of Artificial Sequence: Synthetic peptide
GYYMH

SEQ ID NO: 1231 - protein, 5 aa, synthetic construct
  REGION 1..5: note = Description of Artificial Sequence: Synthetic peptide
GYYMH

SEQ ID NO: 1232 - protein, 5 aa, synthetic construct
  REGION 1..5: note = Description of Artificial Sequence: Synthetic peptide
GYYMH

SEQ ID NO: 1233 - protein, 5 aa, synthetic construct
  REGION 1..5: note = Description of Artificial Sequence: Synthetic peptide
GYYMH

SEQ ID NO: 1234 - protein, 5 aa, synthetic construct
  REGION 1..5: note = Description of Artificial Sequence: Synthetic peptide
GYYMH

SEQ ID NO: 1235 - protein, 5 aa, synthetic construct
  REGION 1..5: note = Description of Artificial Sequence: Synthetic peptide
GYYMH

SEQ ID NO: 1236 - protein, 5 aa, synthetic construct
  REGION 1..5: note = Description of Artificial Sequence: Synthetic peptide
GYYMH

SEQ ID NO: 1237 - protein, 5 aa, synthetic construct
  REGION 1..5: note = Description of Artificial Sequence: Synthetic peptide
NFGMH

SEQ ID NO: 1238 - protein, 5 aa, synthetic construct
  REGION 1..5: note = Description of Artificial Sequence: Synthetic peptide
YFGMH

SEQ ID NO: 1239 - protein, 5 aa, synthetic construct
  REGION 1..5: note = Description of Artificial Sequence: Synthetic peptide
GYYMH

SEQ ID NO: 1240 - protein, 5 aa, synthetic construct
  REGION 1..5: note = Description of Artificial Sequence: Synthetic peptide
SYGIH

SEQ ID NO: 1241 - protein, 5 aa, synthetic construct
  REGION 1..5: note = Description of Artificial Sequence: Synthetic peptide
SYDIN

SEQ ID NO: 1242 - protein, 5 aa, synthetic construct
  REGION 1..5: note = Description of Artificial Sequence: Synthetic peptide
SYGIH

SEQ ID NO: 1243 - protein, 5 aa, synthetic construct
  REGION 1..5: note = Description of Artificial Sequence: Synthetic peptide
SYGIH

SEQ ID NO: 1244 - protein, 5 aa, synthetic construct
  REGION 1..5: note = Description of Artificial Sequence: Synthetic peptide
SYGIH

SEQ ID NO: 1245 - protein, 5 aa, synthetic construct
  REGION 1..5: note = Description of Artificial Sequence: Synthetic peptide
SYGIH

SEQ ID NO: 1246 - protein, 5 aa, synthetic construct
  REGION 1..5: note = Description of Artificial Sequence: Synthetic peptide
SYGIH

SEQ ID NO: 1247 - protein, 5 aa, synthetic construct
  REGION 1..5: note = Description of Artificial Sequence: Synthetic peptide
SYGIH

SEQ ID NO: 1248 - protein, 5 aa, synthetic construct
  REGION 1..5: note = Description of Artificial Sequence: Synthetic peptide
SYDIN

SEQ ID NO: 1249 - protein, 5 aa, synthetic construct
  REGION 1..5: note = Description of Artificial Sequence: Synthetic peptide
SYDIN

SEQ ID NO: 1250 - protein, 5 aa, synthetic construct
  REGION 1..5: note = Description of Artificial Sequence: Synthetic peptide
SYDIN

SEQ ID NO: 1251 - protein, 5 aa, synthetic construct
  REGION 1..5: note = Description of Artificial Sequence: Synthetic peptide
SYDIN

SEQ ID NO: 1252 - protein, 5 aa, synthetic construct
  REGION 1..5: note = Description of Artificial Sequence: Synthetic peptide
SYDIN

SEQ ID NO: 1253 - protein, 5 aa, synthetic construct
  REGION 1..5: note = Description of Artificial Sequence: Synthetic peptide
SYDIN

SEQ ID NO: 1254 - protein, 5 aa, synthetic construct
  REGION 1..5: note = Description of Artificial Sequence: Synthetic peptide
SYDIN

SEQ ID NO: 1255 - protein, 5 aa, synthetic construct
  REGION 1..5: note = Description of Artificial Sequence: Synthetic peptide
SYDIN

SEQ ID NO: 1256 - protein, 5 aa, synthetic construct
  REGION 1..5: note = Description of Artificial Sequence: Synthetic peptide
SYGIH

SEQ ID NO: 1257 - protein, 17 aa, synthetic construct
  REGION 1..17: note = Description of Artificial Sequence: Synthetic peptide
WINPNSGGTNYAQKFQG

SEQ ID NO: 1258 - protein, 17 aa, synthetic construct
  REGION 1..17: note = Description of Artificial Sequence: Synthetic peptide
VIWYDGSNENYADSVKG

SEQ ID NO: 1259 - protein, 17 aa, synthetic construct
  REGION 1..17: note = Description of Artificial Sequence: Synthetic peptide
VIWYDGSNKYYADSVKG

SEQ ID NO: 1260 - protein, 17 aa, synthetic construct
  REGION 1..17: note = Description of Artificial Sequence: Synthetic peptide
VIWYDGSNKYYADSVKG

SEQ ID NO: 1261 - protein, 17 aa, synthetic construct
  REGION 1..17: note = Description of Artificial Sequence: Synthetic peptide
WINPDSGGTDYSQRFQG

SEQ ID NO: 1262 - protein, 17 aa, synthetic construct
  REGION 1..17: note = Description of Artificial Sequence: Synthetic peptide
WINPDSGGTDYSQRFQG

SEQ ID NO: 1263 - protein, 17 aa, synthetic construct
  REGION 1..17: note = Description of Artificial Sequence: Synthetic peptide
WISPNSGDTSYAQKFQD

SEQ ID NO: 1264 - protein, 17 aa, synthetic construct
  REGION 1..17: note = Description of Artificial Sequence: Synthetic peptide
WISPNNGDTNYAQKFQD

SEQ ID NO: 1265 - protein, 16 aa, synthetic construct
  REGION 1..16: note = Description of Artificial Sequence: Synthetic peptide
YIYYSGSTYYNPSLKS

SEQ ID NO: 1266 - protein, 17 aa, synthetic construct
  REGION 1..17: note = Description of Artificial Sequence: Synthetic peptide
AIWFDGSDKYYADSVKG

SEQ ID NO: 1267 - protein, 17 aa, synthetic construct
  REGION 1..17: note = Description of Artificial Sequence: Synthetic peptide
VIWYDGSNKYYADSVKG

SEQ ID NO: 1268 - protein, 17 aa, synthetic construct
  REGION 1..17: note = Description of Artificial Sequence: Synthetic peptide
AIWYDGNNKYYADSVKG

SEQ ID NO: 1269 - protein, 16 aa, synthetic construct
  REGION 1..16: note = Description of Artificial Sequence: Synthetic peptide
RIYTSGSTNYNPSLKS

SEQ ID NO: 1270 - protein, 16 aa, synthetic construct
  REGION 1..16: note = Description of Artificial Sequence: Synthetic peptide
RIYTSGSTNYNPSLKS

SEQ ID NO: 1271 - protein, 17 aa, synthetic construct
  REGION 1..17: note = Description of Artificial Sequence: Synthetic peptide
VIWYDASNKYYADAVKG

SEQ ID NO: 1272 - protein, 17 aa, synthetic construct
  REGION 1..17: note = Description of Artificial Sequence: Synthetic peptide
VIWYDASNKYYADSVKG

SEQ ID NO: 1273 - protein, 17 aa, synthetic construct
  REGION 1..17: note = Description of Artificial Sequence: Synthetic peptide
VIWYDGSNKYYADAVKG

SEQ ID NO: 1274 - protein, 17 aa, synthetic construct
  REGION 1..17: note = Description of Artificial Sequence: Synthetic peptide
VIWYDASNKYYADAVKG

SEQ ID NO: 1275 - protein, 17 aa, synthetic construct
  REGION 1..17: note = Description of Artificial Sequence: Synthetic peptide
VIWYDASNKYYADAVKG

SEQ ID NO: 1276 - protein, 17 aa, synthetic construct
  REGION 1..17: note = Description of Artificial Sequence: Synthetic peptide
VIWYDASNKYYADAVKG

SEQ ID NO: 1277 - protein, 17 aa, synthetic construct
  REGION 1..17: note = Description of Artificial Sequence: Synthetic peptide
VIWYDASNENYADAVKG

SEQ ID NO: 1278 - protein, 17 aa, synthetic construct
  REGION 1..17: note = Description of Artificial Sequence: Synthetic peptide
VIWYDASNENYADAVKG

SEQ ID NO: 1279 - protein, 17 aa, synthetic construct
  REGION 1..17: note = Description of Artificial Sequence: Synthetic peptide
VIWYDASNENYADAVKG

SEQ ID NO: 1280 - protein, 17 aa, synthetic construct
  REGION 1..17: note = Description of Artificial Sequence: Synthetic peptide
VIWYDASNENYADSVKG

SEQ ID NO: 1281 - protein, 17 aa, synthetic construct
  REGION 1..17: note = Description of Artificial Sequence: Synthetic peptide
VIWYDGSNENYADAVKG

SEQ ID NO: 1282 - protein, 17 aa, synthetic construct
  REGION 1..17: note = Description of Artificial Sequence: Synthetic peptide
VIWYDASNENYADAVKG

SEQ ID NO: 1283 - protein, 17 aa, synthetic construct
  REGION 1..17: note = Description of Artificial Sequence: Synthetic peptide
VIWYDASNENYADAVKG

SEQ ID NO: 1284 - protein, 17 aa, synthetic construct
  REGION 1..17: note = Description of Artificial Sequence: Synthetic peptide
VIWYDGSNENYADSVKG

SEQ ID NO: 1285 - protein, 17 aa, synthetic construct
  REGION 1..17: note = Description of Artificial Sequence: Synthetic peptide
VIWYDASNENYADAVKG

SEQ ID NO: 1286 - protein, 17 aa, synthetic construct
  REGION 1..17: note = Description of Artificial Sequence: Synthetic peptide
VIWYDASNENYADAVKG

SEQ ID NO: 1287 - protein, 17 aa, synthetic construct
  REGION 1..17: note = Description of Artificial Sequence: Synthetic peptide
VIWYDASNENYADAVKG

SEQ ID NO: 1288 - protein, 17 aa, synthetic construct
  REGION 1..17: note = Description of Artificial Sequence: Synthetic peptide
VIWYDASNENYADAVKG

SEQ ID NO: 1289 - protein, 17 aa, synthetic construct
  REGION 1..17: note = Description of Artificial Sequence: Synthetic peptide
VIWYDASNENYADAVKG

SEQ ID NO: 1290 - protein, 17 aa, synthetic construct
  REGION 1..17: note = Description of Artificial Sequence: Synthetic peptide
VIWYDASNENYADAVKG

SEQ ID NO: 1291 - protein, 17 aa, synthetic construct
  REGION 1..17: note = Description of Artificial Sequence: Synthetic peptide
VIWYDASNENYADAVKG

SEQ ID NO: 1292 - protein, 17 aa, synthetic construct
  REGION 1..17: note = Description of Artificial Sequence: Synthetic peptide
VIWYDGSNENYADAVKG

SEQ ID NO: 1293 - protein, 17 aa, synthetic construct
  REGION 1..17: note = Description of Artificial Sequence: Synthetic peptide
VIWYDASNENYADSVKG

SEQ ID NO: 1294 - protein, 17 aa, synthetic construct
  REGION 1..17: note = Description of Artificial Sequence: Synthetic peptide
VIWYDASNENYADAVKG

SEQ ID NO: 1295 - protein, 17 aa, synthetic construct
  REGION 1..17: note = Description of Artificial Sequence: Synthetic peptide
VIWYDASNENYADAVKG

SEQ ID NO: 1296 - protein, 17 aa, synthetic construct
  REGION 1..17: note = Description of Artificial Sequence: Synthetic peptide
VIWYDASNKYYADAVKG

SEQ ID NO: 1297 - protein, 17 aa, synthetic construct
  REGION 1..17: note = Description of Artificial Sequence: Synthetic peptide
VIWYDASNKYYADAVKG

SEQ ID NO: 1298 - protein, 17 aa, synthetic construct
  REGION 1..17: note = Description of Artificial Sequence: Synthetic peptide
VIWYDASNKYYADAVKG

SEQ ID NO: 1299 - protein, 17 aa, synthetic construct
  REGION 1..17: note = Description of Artificial Sequence: Synthetic peptide
VIWYDASNKYYADAVKG

SEQ ID NO: 1300 - protein, 17 aa, synthetic construct
  REGION 1..17: note = Description of Artificial Sequence: Synthetic peptide
VIWYDASNKYYADAVKG

SEQ ID NO: 1301 - protein, 17 aa, synthetic construct
  REGION 1..17: note = Description of Artificial Sequence: Synthetic peptide
VIWYDASNKYYADAVKG

SEQ ID NO: 1302 - protein, 17 aa, synthetic construct
  REGION 1..17: note = Description of Artificial Sequence: Synthetic peptide
VIWYDASNKYYADAVKG

SEQ ID NO: 1303 - protein, 17 aa, synthetic construct
  REGION 1..17: note = Description of Artificial Sequence: Synthetic peptide
VIWYDASNKYYADSVKG

SEQ ID NO: 1304 - protein, 17 aa, synthetic construct
  REGION 1..17: note = Description of Artificial Sequence: Synthetic peptide
VIWYDGSNKYYADAVKG

SEQ ID NO: 1305 - protein, 17 aa, synthetic construct
  REGION 1..17: note = Description of Artificial Sequence: Synthetic peptide
VIWYDASNKYYADAVKG

SEQ ID NO: 1306 - protein, 17 aa, synthetic construct
  REGION 1..17: note = Description of Artificial Sequence: Synthetic peptide
VIWYDASNKYYADAVKG

SEQ ID NO: 1307 - protein, 17 aa, synthetic construct
  REGION 1..17: note = Description of Artificial Sequence: Synthetic peptide
VIWYDASNKYYADAVKG

SEQ ID NO: 1308 - protein, 17 aa, synthetic construct
  REGION 1..17: note = Description of Artificial Sequence: Synthetic peptide
VIWYDASNKYYADAVKG

SEQ ID NO: 1309 - protein, 17 aa, synthetic construct
  REGION 1..17: note = Description of Artificial Sequence: Synthetic peptide
VIWYDGSNKYYADSVKG

SEQ ID NO: 1310 - protein, 17 aa, synthetic construct
  REGION 1..17: note = Description of Artificial Sequence: Synthetic peptide
VIWYDASNKYYADSVKG

SEQ ID NO: 1311 - protein, 17 aa, synthetic construct
  REGION 1..17: note = Description of Artificial Sequence: Synthetic peptide
VIWYDGSNKYYADAVKG

SEQ ID NO: 1312 - protein, 17 aa, synthetic construct
  REGION 1..17: note = Description of Artificial Sequence: Synthetic peptide
AIWYDANNKYYADAVKG

SEQ ID NO: 1313 - protein, 17 aa, synthetic construct
  REGION 1..17: note = Description of Artificial Sequence: Synthetic peptide
AIWYDANNKYYADAVKG

SEQ ID NO: 1314 - protein, 17 aa, synthetic construct
  REGION 1..17: note = Description of Artificial Sequence: Synthetic peptide
AIWYDANNKYYADAVKG

SEQ ID NO: 1315 - protein, 17 aa, synthetic construct
  REGION 1..17: note = Description of Artificial Sequence: Synthetic peptide
AIWYDANNKYYADAVKG

SEQ ID NO: 1316 - protein, 17 aa, synthetic construct
  REGION 1..17: note = Description of Artificial Sequence: Synthetic peptide
AIWYDANNKYYADAVKG

SEQ ID NO: 1317 - protein, 17 aa, synthetic construct
  REGION 1..17: note = Description of Artificial Sequence: Synthetic peptide
AIWYDANNKYYADAVKG

SEQ ID NO: 1318 - protein, 17 aa, synthetic construct
  REGION 1..17: note = Description of Artificial Sequence: Synthetic peptide
AIWYDANNKYYADAVKG

SEQ ID NO: 1319 - protein, 17 aa, synthetic construct
  REGION 1..17: note = Description of Artificial Sequence: Synthetic peptide
AIWYDGNNKYYADAVKG

SEQ ID NO: 1320 - protein, 17 aa, synthetic construct
  REGION 1..17: note = Description of Artificial Sequence: Synthetic peptide
AIWYDANNKYYADSVKG

SEQ ID NO: 1321 - protein, 17 aa, synthetic construct
  REGION 1..17: note = Description of Artificial Sequence: Synthetic peptide
AIWYDANNKYYADAVKG

SEQ ID NO: 1322 - protein, 17 aa, synthetic construct
  REGION 1..17: note = Description of Artificial Sequence: Synthetic peptide
AIWYDANNKYYADAVKG

SEQ ID NO: 1323 - protein, 17 aa, synthetic construct
  REGION 1..17: note = Description of Artificial Sequence: Synthetic peptide
VIWYDASNKYYEDAVKG

SEQ ID NO: 1324 - protein, 17 aa, synthetic construct
  REGION 1..17: note = Description of Artificial Sequence: Synthetic peptide
VIWYDGSNKYYEDSVKG

SEQ ID NO: 1325 - protein, 17 aa, synthetic construct
  REGION 1..17: note = Description of Artificial Sequence: Synthetic peptide
VIWYDGSNKYYEDAVKG

SEQ ID NO: 1326 - protein, 17 aa, synthetic construct
  REGION 1..17: note = Description of Artificial Sequence: Synthetic peptide
VIWYDASNKYYEDSVKG

SEQ ID NO: 1327 - protein, 17 aa, synthetic construct
  REGION 1..17: note = Description of Artificial Sequence: Synthetic peptide
AIWFDASDKYYADAVKG

SEQ ID NO: 1328 - protein, 17 aa, synthetic construct
  REGION 1..17: note = Description of Artificial Sequence: Synthetic peptide
AIWFDASDKYYADSVKG

SEQ ID NO: 1329 - protein, 17 aa, synthetic construct
  REGION 1..17: note = Description of Artificial Sequence: Synthetic peptide
AIWFDGSDKYYADAVKG

SEQ ID NO: 1330 - protein, 17 aa, synthetic construct
  REGION 1..17: note = Description of Artificial Sequence: Synthetic peptide
AIWFDASDKYYADAVKG

SEQ ID NO: 1331 - protein, 17 aa, synthetic construct
  REGION 1..17: note = Description of Artificial Sequence: Synthetic peptide
AIWFDASDKYYADAVKG

SEQ ID NO: 1332 - protein, 17 aa, synthetic construct
  REGION 1..17: note = Description of Artificial Sequence: Synthetic peptide
AIWFDASDKYYADAVKG

SEQ ID NO: 1333 - protein, 17 aa, synthetic construct
  REGION 1..17: note = Description of Artificial Sequence: Synthetic peptide
AIWFDASDKYYADAVKG

SEQ ID NO: 1334 - protein, 17 aa, synthetic construct
  REGION 1..17: note = Description of Artificial Sequence: Synthetic peptide
AIWFDASDKYYADAVKG

SEQ ID NO: 1335 - protein, 16 aa, synthetic construct
  REGION 1..16: note = Description of Artificial Sequence: Synthetic peptide
YIYYSGSTYYNPSLKS

SEQ ID NO: 1336 - protein, 16 aa, synthetic construct
  REGION 1..16: note = Description of Artificial Sequence: Synthetic peptide
YIYYSGSTYYNPSLKS

SEQ ID NO: 1337 - protein, 16 aa, synthetic construct
  REGION 1..16: note = Description of Artificial Sequence: Synthetic peptide
YIYYSGSTYYNPSLKS

SEQ ID NO: 1338 - protein, 16 aa, synthetic construct
  REGION 1..16: note = Description of Artificial Sequence: Synthetic peptide
YIYYSGSTYYNPSLKS

SEQ ID NO: 1339 - protein, 16 aa, synthetic construct
  REGION 1..16: note = Description of Artificial Sequence: Synthetic peptide
YIYYSGSTYYNPSLKS

SEQ ID NO: 1340 - protein, 16 aa, synthetic construct
  REGION 1..16: note = Description of Artificial Sequence: Synthetic peptide
YIYYSGSTYYNPSLKS

SEQ ID NO: 1341 - protein, 16 aa, synthetic construct
  REGION 1..16: note = Description of Artificial Sequence: Synthetic peptide
YIYYSGSTYYNPSLKS

SEQ ID NO: 1342 - protein, 17 aa, synthetic construct
  REGION 1..17: note = Description of Artificial Sequence: Synthetic peptide
WINPESGGTDYSQRFQG

SEQ ID NO: 1343 - protein, 17 aa, synthetic construct
  REGION 1..17: note = Description of Artificial Sequence: Synthetic peptide
WINPESGGTDYSQRFQG

SEQ ID NO: 1344 - protein, 17 aa, synthetic construct
  REGION 1..17: note = Description of Artificial Sequence: Synthetic peptide
WINPDAGGTDYSQRFQG

SEQ ID NO: 1345 - protein, 17 aa, synthetic construct
  REGION 1..17: note = Description of Artificial Sequence: Synthetic peptide
WINPDAGGTDYSQRFQG

SEQ ID NO: 1346 - protein, 17 aa, synthetic construct
  REGION 1..17: note = Description of Artificial Sequence: Synthetic peptide
WINPDSGGTDYSQRFQG

SEQ ID NO: 1347 - protein, 17 aa, synthetic construct
  REGION 1..17: note = Description of Artificial Sequence: Synthetic peptide
WINPDSGGTDYSQRFQG

SEQ ID NO: 1348 - protein, 17 aa, synthetic construct
  REGION 1..17: note = Description of Artificial Sequence: Synthetic peptide
WINPDSGGTDYSQRFQG

SEQ ID NO: 1349 - protein, 17 aa, synthetic construct
  REGION 1..17: note = Description of Artificial Sequence: Synthetic peptide
WINPDAGGTDYSQRFQG

SEQ ID NO: 1350 - protein, 17 aa, synthetic construct
  REGION 1..17: note = Description of Artificial Sequence: Synthetic peptide
WINPDAGGTDYSQRFQG

SEQ ID NO: 1351 - protein, 17 aa, synthetic construct
  REGION 1..17: note = Description of Artificial Sequence: Synthetic peptide
WINPDAGGTDYSQRFQG

SEQ ID NO: 1352 - protein, 17 aa, synthetic construct
  REGION 1..17: note = Description of Artificial Sequence: Synthetic peptide
WINPESGGTDYSQRFQG

SEQ ID NO: 1353 - protein, 17 aa, synthetic construct
  REGION 1..17: note = Description of Artificial Sequence: Synthetic peptide
WISPNSGETSYAQKFQD

SEQ ID NO: 1354 - protein, 17 aa, synthetic construct
  REGION 1..17: note = Description of Artificial Sequence: Synthetic peptide
WISPNSGDTSYAQKFQD

SEQ ID NO: 1355 - protein, 17 aa, synthetic construct
  REGION 1..17: note = Description of Artificial Sequence: Synthetic peptide
WISPNSGETSYAQKFQD

SEQ ID NO: 1356 - protein, 17 aa, synthetic construct
  REGION 1..17: note = Description of Artificial Sequence: Synthetic peptide
WISPNSGETSYAQKFQD

SEQ ID NO: 1357 - protein, 17 aa, synthetic construct
  REGION 1..17: note = Description of Artificial Sequence: Synthetic peptide
WISPNSGDTSYAQKFQD

SEQ ID NO: 1358 - protein, 17 aa, synthetic construct
  REGION 1..17: note = Description of Artificial Sequence: Synthetic peptide
WISPNSGETSYAQKFQD

SEQ ID NO: 1359 - protein, 17 aa, synthetic construct
  REGION 1..17: note = Description of Artificial Sequence: Synthetic peptide
WISPNSGDTSYAQKFQD

SEQ ID NO: 1360 - protein, 17 aa, synthetic construct
  REGION 1..17: note = Description of Artificial Sequence: Synthetic peptide
WISPNSGETSYAQKFQD

SEQ ID NO: 1361 - protein, 17 aa, synthetic construct
  REGION 1..17: note = Description of Artificial Sequence: Synthetic peptide
WISPNSGETSYAQKFQD

SEQ ID NO: 1362 - protein, 17 aa, synthetic construct
  REGION 1..17: note = Description of Artificial Sequence: Synthetic peptide
WINPESGGTDYSQRFQG

SEQ ID NO: 1363 - protein, 17 aa, synthetic construct
  REGION 1..17: note = Description of Artificial Sequence: Synthetic peptide
WINPESGGTDYSQRFQG

SEQ ID NO: 1364 - protein, 17 aa, synthetic construct
  REGION 1..17: note = Description of Artificial Sequence: Synthetic peptide
WINPDSGGTDYSQRFQG

SEQ ID NO: 1365 - protein, 17 aa, synthetic construct
  REGION 1..17: note = Description of Artificial Sequence: Synthetic peptide
WINPESGGTDYSQRFQG

SEQ ID NO: 1366 - protein, 17 aa, synthetic construct
  REGION 1..17: note = Description of Artificial Sequence: Synthetic peptide
WINPESGGTDYSQRFQG

SEQ ID NO: 1367 - protein, 17 aa, synthetic construct
  REGION 1..17: note = Description of Artificial Sequence: Synthetic peptide
WISPNQGETNYAQKFQD

SEQ ID NO: 1368 - protein, 17 aa, synthetic construct
  REGION 1..17: note = Description of Artificial Sequence: Synthetic peptide
WISPNQGDTNYAQKFQD

SEQ ID NO: 1369 - protein, 17 aa, synthetic construct
  REGION 1..17: note = Description of Artificial Sequence: Synthetic peptide
WISPNQGETNYAQKFQD

SEQ ID NO: 1370 - protein, 17 aa, synthetic construct
  REGION 1..17: note = Description of Artificial Sequence: Synthetic peptide
WISPNNGETNYAQKFQD

SEQ ID NO: 1371 - protein, 17 aa, synthetic construct
  REGION 1..17: note = Description of Artificial Sequence: Synthetic peptide
WISPNNGDTNYAQKFQD

SEQ ID NO: 1372 - protein, 17 aa, synthetic construct
  REGION 1..17: note = Description of Artificial Sequence: Synthetic peptide
WISPNQGDTNYAQKFQD

SEQ ID NO: 1373 - protein, 17 aa, synthetic construct
  REGION 1..17: note = Description of Artificial Sequence: Synthetic peptide
WISPNNGETNYAQKFQD

SEQ ID NO: 1374 - protein, 17 aa, synthetic construct
  REGION 1..17: note = Description of Artificial Sequence: Synthetic peptide
WISPNQGETNYAQKFQD

SEQ ID NO: 1375 - protein, 17 aa, synthetic construct
  REGION 1..17: note = Description of Artificial Sequence: Synthetic peptide
WISPNNGDTNYAQKFQD

SEQ ID NO: 1376 - protein, 17 aa, synthetic construct
  REGION 1..17: note = Description of Artificial Sequence: Synthetic peptide
WISPNQGDTNYAQKFQD

SEQ ID NO: 1377 - protein, 17 aa, synthetic construct
  REGION 1..17: note = Description of Artificial Sequence: Synthetic peptide
WISPNNGETNYAQKFQD

SEQ ID NO: 1378 - protein, 17 aa, synthetic construct
  REGION 1..17: note = Description of Artificial Sequence: Synthetic peptide
WISPNQGETNYAQKFQD

SEQ ID NO: 1379 - protein, 17 aa, synthetic construct
  REGION 1..17: note = Description of Artificial Sequence: Synthetic peptide
WISPNQGETNYAQKFQD

SEQ ID NO: 1380 - protein, 17 aa, synthetic construct
  REGION 1..17: note = Description of Artificial Sequence: Synthetic peptide
WINPNSGGTNYAQKFQG

SEQ ID NO: 1381 - protein, 17 aa, synthetic construct
  REGION 1..17: note = Description of Artificial Sequence: Synthetic peptide
WINPNSGGTNYAQKFQG

SEQ ID NO: 1382 - protein, 17 aa, synthetic construct
  REGION 1..17: note = Description of Artificial Sequence: Synthetic peptide
WINPNSGGTNYAQKFQG

SEQ ID NO: 1383 - protein, 17 aa, synthetic construct
  REGION 1..17: note = Description of Artificial Sequence: Synthetic peptide
WINPNSGGTNYAQKFQG

SEQ ID NO: 1384 - protein, 17 aa, synthetic construct
  REGION 1..17: note = Description of Artificial Sequence: Synthetic peptide
WINPNSGGTNYAQKFQG

SEQ ID NO: 1385 - protein, 17 aa, synthetic construct
  REGION 1..17: note = Description of Artificial Sequence: Synthetic peptide
WINPNSGGTNYAQKFQG

SEQ ID NO: 1386 - protein, 17 aa, synthetic construct
  REGION 1..17: note = Description of Artificial Sequence: Synthetic peptide
WINPNSGGTNYAQKFQG

SEQ ID NO: 1387 - protein, 17 aa, synthetic construct
  REGION 1..17: note = Description of Artificial Sequence: Synthetic peptide
WINPNSGGTNYAQKFQG

SEQ ID NO: 1388 - protein, 17 aa, synthetic construct
  REGION 1..17: note = Description of Artificial Sequence: Synthetic peptide
WINPNSGGTNYAQKFQG

SEQ ID NO: 1389 - protein, 17 aa, synthetic construct
  REGION 1..17: note = Description of Artificial Sequence: Synthetic peptide
WINPNSGGTNYAQKFQG

SEQ ID NO: 1390 - protein, 17 aa, synthetic construct
  REGION 1..17: note = Description of Artificial Sequence: Synthetic peptide
WINPNSGGTNYAQKFQG

SEQ ID NO: 1391 - protein, 17 aa, synthetic construct
  REGION 1..17: note = Description of Artificial Sequence: Synthetic peptide
WINPNSGGTNYAQKFQG

SEQ ID NO: 1392 - protein, 17 aa, synthetic construct
  REGION 1..17: note = Description of Artificial Sequence: Synthetic peptide
WINPNSGGTNYAQKFQG

SEQ ID NO: 1393 - protein, 17 aa, synthetic construct
  REGION 1..17: note = Description of Artificial Sequence: Synthetic peptide
WINPNSGGTNYAQKFQG

SEQ ID NO: 1394 - protein, 17 aa, synthetic construct
  REGION 1..17: note = Description of Artificial Sequence: Synthetic peptide
VIWYDASNENYADAVKG

SEQ ID NO: 1395 - protein, 17 aa, synthetic construct
  REGION 1..17: note = Description of Artificial Sequence: Synthetic peptide
VIWYDASNKYYADAVKG

SEQ ID NO: 1396 - protein, 17 aa, synthetic construct
  REGION 1..17: note = Description of Artificial Sequence: Synthetic peptide
WINPNSGGTNYAQKFQG

SEQ ID NO: 1397 - protein, 17 aa, synthetic construct
  REGION 1..17: note = Description of Artificial Sequence: Synthetic peptide
VIWYDGSNKFHADSVKG

SEQ ID NO: 1398 - protein, 17 aa, synthetic construct
  REGION 1..17: note = Description of Artificial Sequence: Synthetic peptide
WMNPNSGNTGYAQKFQG

SEQ ID NO: 1399 - protein, 17 aa, synthetic construct
  REGION 1..17: note = Description of Artificial Sequence: Synthetic peptide
VIWYDASNKFHADAVKG

SEQ ID NO: 1400 - protein, 17 aa, synthetic construct
  REGION 1..17: note = Description of Artificial Sequence: Synthetic peptide
VIWYDASNKFHADAVKG

SEQ ID NO: 1401 - protein, 17 aa, synthetic construct
  REGION 1..17: note = Description of Artificial Sequence: Synthetic peptide
VIWYDASNKFHADAVKG

SEQ ID NO: 1402 - protein, 17 aa, synthetic construct
  REGION 1..17: note = Description of Artificial Sequence: Synthetic peptide
VIWYDASNKFHADAVKG

SEQ ID NO: 1403 - protein, 17 aa, synthetic construct
  REGION 1..17: note = Description of Artificial Sequence: Synthetic peptide
VIWYDASNKFHADSVKG

SEQ ID NO: 1404 - protein, 17 aa, synthetic construct
  REGION 1..17: note = Description of Artificial Sequence: Synthetic peptide
VIWYDGSNKFHADAVKG

SEQ ID NO: 1405 - protein, 17 aa, synthetic construct
  REGION 1..17: note = Description of Artificial Sequence: Synthetic peptide
WMNPNSGGTGYAQKFQG

SEQ ID NO: 1406 - protein, 17 aa, synthetic construct
  REGION 1..17: note = Description of Artificial Sequence: Synthetic peptide
WMNPNSGNTGYAQKFQG

SEQ ID NO: 1407 - protein, 17 aa, synthetic construct
  REGION 1..17: note = Description of Artificial Sequence: Synthetic peptide
WMNPNSGGTGYAQKFQG

SEQ ID NO: 1408 - protein, 17 aa, synthetic construct
  REGION 1..17: note = Description of Artificial Sequence: Synthetic peptide
WMNPNSGGTGYAQKFQG

SEQ ID NO: 1409 - protein, 17 aa, synthetic construct
  REGION 1..17: note = Description of Artificial Sequence: Synthetic peptide
WMNPNSGGTGYAQKFQG

SEQ ID NO: 1410 - protein, 17 aa, synthetic construct
  REGION 1..17: note = Description of Artificial Sequence: Synthetic peptide
WMNPNSGNTGYAQKFQG

SEQ ID NO: 1411 - protein, 17 aa, synthetic construct
  REGION 1..17: note = Description of Artificial Sequence: Synthetic peptide
WMNPNSGGTGYAQKFQG

SEQ ID NO: 1412 - protein, 17 aa, synthetic construct
  REGION 1..17: note = Description of Artificial Sequence: Synthetic peptide
WMNPNSGGTGYAQKFQG

SEQ ID NO: 1413 - protein, 17 aa, synthetic construct
  REGION 1..17: note = Description of Artificial Sequence: Synthetic peptide
VIWYDASNKFHADAVKG

SEQ ID NO: 1414 - protein, 19 aa, synthetic construct
  REGION 1..19: note = Description of Artificial Sequence: Synthetic peptide
GGDYVWGTYRPHYYYGMDV

SEQ ID NO: 1415 - protein, 12 aa, synthetic construct
  REGION 1..12: note = Description of Artificial Sequence: Synthetic peptide
DGTIFGVVLGDY

SEQ ID NO: 1416 - protein, 12 aa, synthetic construct
  REGION 1..12: note = Description of Artificial Sequence: Synthetic peptide
DGTIFGVLLGDY

SEQ ID NO: 1417 - protein, 11 aa, synthetic construct
  REGION 1..11: note = Description of Artificial Sequence: Synthetic peptide
DRTIFGVVLDY

SEQ ID NO: 1418 - protein, 14 aa, synthetic construct
  REGION 1..14: note = Description of Artificial Sequence: Synthetic peptide
EATIFGMVIVPFDY

SEQ ID NO: 1419 - protein, 14 aa, synthetic construct
  REGION 1..14: note = Description of Artificial Sequence: Synthetic peptide
EATIFGMVIVPFDY

SEQ ID NO: 1420 - protein, 14 aa, synthetic construct
  REGION 1..14: note = Description of Artificial Sequence: Synthetic peptide
EATIFGMLIVPFDY

SEQ ID NO: 1421 - protein, 14 aa, synthetic construct
  REGION 1..14: note = Description of Artificial Sequence: Synthetic peptide
EATIFGMLIVPFDY

SEQ ID NO: 1422 - protein, 16 aa, synthetic construct
  REGION 1..16: note = Description of Artificial Sequence: Synthetic peptide
DRITIFGVVMGGGMDV

SEQ ID NO: 1423 - protein, 11 aa, synthetic construct
  REGION 1..11: note = Description of Artificial Sequence: Synthetic peptide
DQAIFGVVPDY

SEQ ID NO: 1424 - protein, 12 aa, synthetic construct
  REGION 1..12: note = Description of Artificial Sequence: Synthetic peptide
DGTIFGVLLGDY

SEQ ID NO: 1425 - protein, 11 aa, synthetic construct
  REGION 1..11: note = Description of Artificial Sequence: Synthetic peptide
DRTIFGVVLEY

SEQ ID NO: 1426 - protein, 9 aa, synthetic construct
  REGION 1..9: note = Description of Artificial Sequence: Synthetic peptide
DVAVAGFDY

SEQ ID NO: 1427 - protein, 9 aa, synthetic construct
  REGION 1..9: note = Description of Artificial Sequence: Synthetic peptide
DVAVAGFDY

SEQ ID NO: 1428 - protein, 12 aa, synthetic construct
  REGION 1..12: note = Description of Artificial Sequence: Synthetic peptide
DGTIFGVLLGDY

SEQ ID NO: 1429 - protein, 12 aa, synthetic construct
  REGION 1..12: note = Description of Artificial Sequence: Synthetic peptide
DGTIFGVLLGDY

SEQ ID NO: 1430 - protein, 12 aa, synthetic construct
  REGION 1..12: note = Description of Artificial Sequence: Synthetic peptide
DGTIFGVLLGDY

SEQ ID NO: 1431 - protein, 12 aa, synthetic construct
  REGION 1..12: note = Description of Artificial Sequence: Synthetic peptide
DGTIFGVLLGDY

SEQ ID NO: 1432 - protein, 12 aa, synthetic construct
  REGION 1..12: note = Description of Artificial Sequence: Synthetic peptide
DGTIFGVLLGDY

SEQ ID NO: 1433 - protein, 12 aa, synthetic construct
  REGION 1..12: note = Description of Artificial Sequence: Synthetic peptide
DRTIFGVLLGDY

SEQ ID NO: 1434 - protein, 12 aa, synthetic construct
  REGION 1..12: note = Description of Artificial Sequence: Synthetic peptide
DGTIFGVVLGDY

SEQ ID NO: 1435 - protein, 12 aa, synthetic construct
  REGION 1..12: note = Description of Artificial Sequence: Synthetic peptide
DGTIFGVVLGDY

SEQ ID NO: 1436 - protein, 12 aa, synthetic construct
  REGION 1..12: note = Description of Artificial Sequence: Synthetic peptide
DGTIFGVVLGDY

SEQ ID NO: 1437 - protein, 12 aa, synthetic construct
  REGION 1..12: note = Description of Artificial Sequence: Synthetic peptide
DGTIFGVVLGDY

SEQ ID NO: 1438 - protein, 12 aa, synthetic construct
  REGION 1..12: note = Description of Artificial Sequence: Synthetic peptide
DGTIFGVVLGDY

SEQ ID NO: 1439 - protein, 12 aa, synthetic construct
  REGION 1..12: note = Description of Artificial Sequence: Synthetic peptide
DRTIFGVVLGDY

SEQ ID NO: 1440 - protein, 12 aa, synthetic construct
  REGION 1..12: note = Description of Artificial Sequence: Synthetic peptide
DGTIFGVVLGDY

SEQ ID NO: 1441 - protein, 12 aa, synthetic construct
  REGION 1..12: note = Description of Artificial Sequence: Synthetic peptide
DGTIFGVVLGDY

SEQ ID NO: 1442 - protein, 12 aa, synthetic construct
  REGION 1..12: note = Description of Artificial Sequence: Synthetic peptide
DGTIFGVVLGDY

SEQ ID NO: 1443 - protein, 12 aa, synthetic construct
  REGION 1..12: note = Description of Artificial Sequence: Synthetic peptide
DGTIFGVVLGDY

SEQ ID NO: 1444 - protein, 12 aa, synthetic construct
  REGION 1..12: note = Description of Artificial Sequence: Synthetic peptide
DGTIFGVVLGDY

SEQ ID NO: 1445 - protein, 12 aa, synthetic construct
  REGION 1..12: note = Description of Artificial Sequence: Synthetic peptide
DGTIFGVVLGDY

SEQ ID NO: 1446 - protein, 12 aa, synthetic construct
  REGION 1..12: note = Description of Artificial Sequence: Synthetic peptide
DGTIFGVVLGDY

SEQ ID NO: 1447 - protein, 12 aa, synthetic construct
  REGION 1..12: note = Description of Artificial Sequence: Synthetic peptide
DGTIFGVVLGDY

SEQ ID NO: 1448 - protein, 12 aa, synthetic construct
  REGION 1..12: note = Description of Artificial Sequence: Synthetic peptide
DGTIFGVVLGDY

SEQ ID NO: 1449 - protein, 12 aa, synthetic construct
  REGION 1..12: note = Description of Artificial Sequence: Synthetic peptide
DGTIFGVVLGDY

SEQ ID NO: 1450 - protein, 12 aa, synthetic construct
  REGION 1..12: note = Description of Artificial Sequence: Synthetic peptide
DGTIFGVVLGDY

SEQ ID NO: 1451 - protein, 12 aa, synthetic construct
  REGION 1..12: note = Description of Artificial Sequence: Synthetic peptide
DRTIFGVVLGDY

SEQ ID NO: 1452 - protein, 12 aa, synthetic construct
  REGION 1..12: note = Description of Artificial Sequence: Synthetic peptide
DGTIFGVVLGDY

SEQ ID NO: 1453 - protein, 11 aa, synthetic construct
  REGION 1..11: note = Description of Artificial Sequence: Synthetic peptide
DRTIFGVVLDY

SEQ ID NO: 1454 - protein, 11 aa, synthetic construct
  REGION 1..11: note = Description of Artificial Sequence: Synthetic peptide
DRTIFGVVLDY

SEQ ID NO: 1455 - protein, 11 aa, synthetic construct
  REGION 1..11: note = Description of Artificial Sequence: Synthetic peptide
DRTIFGVVLDY

SEQ ID NO: 1456 - protein, 11 aa, synthetic construct
  REGION 1..11: note = Description of Artificial Sequence: Synthetic peptide
DRTIFGVVLDY

SEQ ID NO: 1457 - protein, 11 aa, synthetic construct
  REGION 1..11: note = Description of Artificial Sequence: Synthetic peptide
DRTIFGVVLDY

SEQ ID NO: 1458 - protein, 11 aa, synthetic construct
  REGION 1..11: note = Description of Artificial Sequence: Synthetic peptide
DRTIFGVVLDY

SEQ ID NO: 1459 - protein, 11 aa, synthetic construct
  REGION 1..11: note = Description of Artificial Sequence: Synthetic peptide
DRTIFGVVLDY

SEQ ID NO: 1460 - protein, 11 aa, synthetic construct
  REGION 1..11: note = Description of Artificial Sequence: Synthetic peptide
DRTIFGVVLDY

SEQ ID NO: 1461 - protein, 11 aa, synthetic construct
  REGION 1..11: note = Description of Artificial Sequence: Synthetic peptide
DRTIFGVVLDY

SEQ ID NO: 1462 - protein, 12 aa, synthetic construct
  REGION 1..12: note = Description of Artificial Sequence: Synthetic peptide
DGTIFGVLLGDY

SEQ ID NO: 1463 - protein, 12 aa, synthetic construct
  REGION 1..12: note = Description of Artificial Sequence: Synthetic peptide
DRTIFGVLLGDY

SEQ ID NO: 1464 - protein, 12 aa, synthetic construct
  REGION 1..12: note = Description of Artificial Sequence: Synthetic peptide
DGTIFGVLLGDY

SEQ ID NO: 1465 - protein, 12 aa, synthetic construct
  REGION 1..12: note = Description of Artificial Sequence: Synthetic peptide
DRTIFGVLLGDY

SEQ ID NO: 1466 - protein, 12 aa, synthetic construct
  REGION 1..12: note = Description of Artificial Sequence: Synthetic peptide
DGTIFGVLLGDY

SEQ ID NO: 1467 - protein, 12 aa, synthetic construct
  REGION 1..12: note = Description of Artificial Sequence: Synthetic peptide
DGTIFGVLLGDY

SEQ ID NO: 1468 - protein, 12 aa, synthetic construct
  REGION 1..12: note = Description of Artificial Sequence: Synthetic peptide
DGTIFGVLLGDY

SEQ ID NO: 1469 - protein, 11 aa, synthetic construct
  REGION 1..11: note = Description of Artificial Sequence: Synthetic peptide
DRTIFGVVLEY

SEQ ID NO: 1470 - protein, 11 aa, synthetic construct
  REGION 1..11: note = Description of Artificial Sequence: Synthetic peptide
DRTIFGVVLEY

SEQ ID NO: 1471 - protein, 11 aa, synthetic construct
  REGION 1..11: note = Description of Artificial Sequence: Synthetic peptide
DRTIFGVVLEY

SEQ ID NO: 1472 - protein, 11 aa, synthetic construct
  REGION 1..11: note = Description of Artificial Sequence: Synthetic peptide
DRTIFGVVLEY

SEQ ID NO: 1473 - protein, 11 aa, synthetic construct
  REGION 1..11: note = Description of Artificial Sequence: Synthetic peptide
DRTIFGVVLEY

SEQ ID NO: 1474 - protein, 11 aa, synthetic construct
  REGION 1..11: note = Description of Artificial Sequence: Synthetic peptide
DRTIFGVVLEY

SEQ ID NO: 1475 - protein, 11 aa, synthetic construct
  REGION 1..11: note = Description of Artificial Sequence: Synthetic peptide
DRTIFGVVLEY

SEQ ID NO: 1476 - protein, 11 aa, synthetic construct
  REGION 1..11: note = Description of Artificial Sequence: Synthetic peptide
DRTIFGVVLEY

SEQ ID NO: 1477 - protein, 11 aa, synthetic construct
  REGION 1..11: note = Description of Artificial Sequence: Synthetic peptide
DRTIFGVVLEY

SEQ ID NO: 1478 - protein, 11 aa, synthetic construct
  REGION 1..11: note = Description of Artificial Sequence: Synthetic peptide
DRTIFGVVLEY

SEQ ID NO: 1479 - protein, 11 aa, synthetic construct
  REGION 1..11: note = Description of Artificial Sequence: Synthetic peptide
DRTIFGVVLEY

SEQ ID NO: 1480 - protein, 11 aa, synthetic construct
  REGION 1..11: note = Description of Artificial Sequence: Synthetic peptide
GITIFGHGFEY

SEQ ID NO: 1481 - protein, 11 aa, synthetic construct
  REGION 1..11: note = Description of Artificial Sequence: Synthetic peptide
GITIFGHGFEY

SEQ ID NO: 1482 - protein, 11 aa, synthetic construct
  REGION 1..11: note = Description of Artificial Sequence: Synthetic peptide
GITIFGHGFEY

SEQ ID NO: 1483 - protein, 11 aa, synthetic construct
  REGION 1..11: note = Description of Artificial Sequence: Synthetic peptide
GITIFGHGFEY

SEQ ID NO: 1484 - protein, 11 aa, synthetic construct
  REGION 1..11: note = Description of Artificial Sequence: Synthetic peptide
DQAIFGVVPDY

SEQ ID NO: 1485 - protein, 11 aa, synthetic construct
  REGION 1..11: note = Description of Artificial Sequence: Synthetic peptide
DQAIFGVVPDY

SEQ ID NO: 1486 - protein, 11 aa, synthetic construct
  REGION 1..11: note = Description of Artificial Sequence: Synthetic peptide
DQAIFGVVPDY

SEQ ID NO: 1487 - protein, 11 aa, synthetic construct
  REGION 1..11: note = Description of Artificial Sequence: Synthetic peptide
DQAIFGVVPDY

SEQ ID NO: 1488 - protein, 11 aa, synthetic construct
  REGION 1..11: note = Description of Artificial Sequence: Synthetic peptide
DQAIFGVVPDY

SEQ ID NO: 1489 - protein, 11 aa, synthetic construct
  REGION 1..11: note = Description of Artificial Sequence: Synthetic peptide
DQAIFGVVPDY

SEQ ID NO: 1490 - protein, 11 aa, synthetic construct
  REGION 1..11: note = Description of Artificial Sequence: Synthetic peptide
DQAIFGVVPDY

SEQ ID NO: 1491 - protein, 11 aa, synthetic construct
  REGION 1..11: note = Description of Artificial Sequence: Synthetic peptide
DQAIFGVVPDY

SEQ ID NO: 1492 - protein, 16 aa, synthetic construct
  REGION 1..16: note = Description of Artificial Sequence: Synthetic peptide
DRITIFGVVMGGGMDV

SEQ ID NO: 1493 - protein, 16 aa, synthetic construct
  REGION 1..16: note = Description of Artificial Sequence: Synthetic peptide
DRITIFGVVMGGGMDV

SEQ ID NO: 1494 - protein, 16 aa, synthetic construct
  REGION 1..16: note = Description of Artificial Sequence: Synthetic peptide
DRITIFGVVMGGGMDV

SEQ ID NO: 1495 - protein, 16 aa, synthetic construct
  REGION 1..16: note = Description of Artificial Sequence: Synthetic peptide
DRITIFGVVMGGGMDV

SEQ ID NO: 1496 - protein, 16 aa, synthetic construct
  REGION 1..16: note = Description of Artificial Sequence: Synthetic peptide
DRITIFGVVMGGGMDV

SEQ ID NO: 1497 - protein, 16 aa, synthetic construct
  REGION 1..16: note = Description of Artificial Sequence: Synthetic peptide
DRITIFGVVMGGGMDV

SEQ ID NO: 1498 - protein, 16 aa, synthetic construct
  REGION 1..16: note = Description of Artificial Sequence: Synthetic peptide
DRITIFGVVMGGGMDV

SEQ ID NO: 1499 - protein, 14 aa, synthetic construct
  REGION 1..14: note = Description of Artificial Sequence: Synthetic peptide
EATIFGMVIVPFDY

SEQ ID NO: 1500 - protein, 14 aa, synthetic construct
  REGION 1..14: note = Description of Artificial Sequence: Synthetic peptide
EATIFGMVIVPFDY

SEQ ID NO: 1501 - protein, 14 aa, synthetic construct
  REGION 1..14: note = Description of Artificial Sequence: Synthetic peptide
EATIFGMVIVPFDY

SEQ ID NO: 1502 - protein, 14 aa, synthetic construct
  REGION 1..14: note = Description of Artificial Sequence: Synthetic peptide
EATIFGMVIVPFDY

SEQ ID NO: 1503 - protein, 14 aa, synthetic construct
  REGION 1..14: note = Description of Artificial Sequence: Synthetic peptide
EATIFGMVIVPFDY

SEQ ID NO: 1504 - protein, 14 aa, synthetic construct
  REGION 1..14: note = Description of Artificial Sequence: Synthetic peptide
EATIFGMVIVPFDY

SEQ ID NO: 1505 - protein, 14 aa, synthetic construct
  REGION 1..14: note = Description of Artificial Sequence: Synthetic peptide
EATIFGMVIVPFDY

SEQ ID NO: 1506 - protein, 14 aa, synthetic construct
  REGION 1..14: note = Description of Artificial Sequence: Synthetic peptide
EATIFGMVIVPFDY

SEQ ID NO: 1507 - protein, 14 aa, synthetic construct
  REGION 1..14: note = Description of Artificial Sequence: Synthetic peptide
EATIFGMVIVPFDY

SEQ ID NO: 1508 - protein, 14 aa, synthetic construct
  REGION 1..14: note = Description of Artificial Sequence: Synthetic peptide
EATIFGMVIVPFDY

SEQ ID NO: 1509 - protein, 14 aa, synthetic construct
  REGION 1..14: note = Description of Artificial Sequence: Synthetic peptide
EATIFGMVIVPFDY

SEQ ID NO: 1510 - protein, 14 aa, synthetic construct
  REGION 1..14: note = Description of Artificial Sequence: Synthetic peptide
EATIFGMLIVPFDY

SEQ ID NO: 1511 - protein, 14 aa, synthetic construct
  REGION 1..14: note = Description of Artificial Sequence: Synthetic peptide
EATIFGMLIVPFDY

SEQ ID NO: 1512 - protein, 14 aa, synthetic construct
  REGION 1..14: note = Description of Artificial Sequence: Synthetic peptide
EATIFGMLIVPFDY

SEQ ID NO: 1513 - protein, 14 aa, synthetic construct
  REGION 1..14: note = Description of Artificial Sequence: Synthetic peptide
EATIFGMLIVPFDY

SEQ ID NO: 1514 - protein, 14 aa, synthetic construct
  REGION 1..14: note = Description of Artificial Sequence: Synthetic peptide
EATIFGMLIVPFDY

SEQ ID NO: 1515 - protein, 14 aa, synthetic construct
  REGION 1..14: note = Description of Artificial Sequence: Synthetic peptide
EATIFGMLIVPFDY

SEQ ID NO: 1516 - protein, 14 aa, synthetic construct
  REGION 1..14: note = Description of Artificial Sequence: Synthetic peptide
EATIFGMLIVPFDY

SEQ ID NO: 1517 - protein, 14 aa, synthetic construct
  REGION 1..14: note = Description of Artificial Sequence: Synthetic peptide
EATIFGMLIVPFDY

SEQ ID NO: 1518 - protein, 14 aa, synthetic construct
  REGION 1..14: note = Description of Artificial Sequence: Synthetic peptide
EATIFGMLIVPFDY

SEQ ID NO: 1519 - protein, 14 aa, synthetic construct
  REGION 1..14: note = Description of Artificial Sequence: Synthetic peptide
EATIFGMVIVPFDY

SEQ ID NO: 1520 - protein, 14 aa, synthetic construct
  REGION 1..14: note = Description of Artificial Sequence: Synthetic peptide
EATIFGMVIVPFDY

SEQ ID NO: 1521 - protein, 14 aa, synthetic construct
  REGION 1..14: note = Description of Artificial Sequence: Synthetic peptide
EATIFGMVIVPFDY

SEQ ID NO: 1522 - protein, 14 aa, synthetic construct
  REGION 1..14: note = Description of Artificial Sequence: Synthetic peptide
EATIFGMVIVPFDY

SEQ ID NO: 1523 - protein, 14 aa, synthetic construct
  REGION 1..14: note = Description of Artificial Sequence: Synthetic peptide
EATIFGMVIVPFDY

SEQ ID NO: 1524 - protein, 14 aa, synthetic construct
  REGION 1..14: note = Description of Artificial Sequence: Synthetic peptide
EATIFGMLIVPFDY

SEQ ID NO: 1525 - protein, 14 aa, synthetic construct
  REGION 1..14: note = Description of Artificial Sequence: Synthetic peptide
EATIFGMLIVPFDY

SEQ ID NO: 1526 - protein, 14 aa, synthetic construct
  REGION 1..14: note = Description of Artificial Sequence: Synthetic peptide
EATIFGMLIVPFDY

SEQ ID NO: 1527 - protein, 14 aa, synthetic construct
  REGION 1..14: note = Description of Artificial Sequence: Synthetic peptide
EATIFGMLIVPFDY

SEQ ID NO: 1528 - protein, 14 aa, synthetic construct
  REGION 1..14: note = Description of Artificial Sequence: Synthetic peptide
EATIFGMLIVPFDY

SEQ ID NO: 1529 - protein, 14 aa, synthetic construct
  REGION 1..14: note = Description of Artificial Sequence: Synthetic peptide
EATIFGMLIVPFDY

SEQ ID NO: 1530 - protein, 14 aa, synthetic construct
  REGION 1..14: note = Description of Artificial Sequence: Synthetic peptide
EATIFGMLIVPFDY

SEQ ID NO: 1531 - protein, 14 aa, synthetic construct
  REGION 1..14: note = Description of Artificial Sequence: Synthetic peptide
EATIFGMLIVPFDY

SEQ ID NO: 1532 - protein, 14 aa, synthetic construct
  REGION 1..14: note = Description of Artificial Sequence: Synthetic peptide
EATIFGMLIVPFDY

SEQ ID NO: 1533 - protein, 14 aa, synthetic construct
  REGION 1..14: note = Description of Artificial Sequence: Synthetic peptide
EATIFGMLIVPFDY

SEQ ID NO: 1534 - protein, 14 aa, synthetic construct
  REGION 1..14: note = Description of Artificial Sequence: Synthetic peptide
EATIFGMLIVPFDY

SEQ ID NO: 1535 - protein, 14 aa, synthetic construct
  REGION 1..14: note = Description of Artificial Sequence: Synthetic peptide
EATIFGMLIVPFDY

SEQ ID NO: 1536 - protein, 14 aa, synthetic construct
  REGION 1..14: note = Description of Artificial Sequence: Synthetic peptide
EATIFGMLIVPFDY

SEQ ID NO: 1537 - protein, 19 aa, synthetic construct
  REGION 1..19: note = Description of Artificial Sequence: Synthetic peptide
GGDYVWGTYRPHYYYGMDV

SEQ ID NO: 1538 - protein, 19 aa, synthetic construct
  REGION 1..19: note = Description of Artificial Sequence: Synthetic peptide
GGDYVWGTYRPHYYYGMDV

SEQ ID NO: 1539 - protein, 19 aa, synthetic construct
  REGION 1..19: note = Description of Artificial Sequence: Synthetic peptide
GGDYVWGTYRPHYYYGMDV

SEQ ID NO: 1540 - protein, 19 aa, synthetic construct
  REGION 1..19: note = Description of Artificial Sequence: Synthetic peptide
GGDYVWGTYRPHYYYGMDV

SEQ ID NO: 1541 - protein, 19 aa, synthetic construct
  REGION 1..19: note = Description of Artificial Sequence: Synthetic peptide
GGDYVWGTYRPHYYYGMDV

SEQ ID NO: 1542 - protein, 19 aa, synthetic construct
  REGION 1..19: note = Description of Artificial Sequence: Synthetic peptide
GGDYVWGTYRPHYYYGMDV

SEQ ID NO: 1543 - protein, 19 aa, synthetic construct
  REGION 1..19: note = Description of Artificial Sequence: Synthetic peptide
GGDYVWGTYRPHYYYGMDV

SEQ ID NO: 1544 - protein, 19 aa, synthetic construct
  REGION 1..19: note = Description of Artificial Sequence: Synthetic peptide
GGDYVWGTYRPHYYYGMDV

SEQ ID NO: 1545 - protein, 19 aa, synthetic construct
  REGION 1..19: note = Description of Artificial Sequence: Synthetic peptide
GGDYVWGTYRPHYYYGMDV

SEQ ID NO: 1546 - protein, 19 aa, synthetic construct
  REGION 1..19: note = Description of Artificial Sequence: Synthetic peptide
GGDYVWGTYRPHYYYGMDV

SEQ ID NO: 1547 - protein, 19 aa, synthetic construct
  REGION 1..19: note = Description of Artificial Sequence: Synthetic peptide
GGDYVWGTYRPHYYYGMDV

SEQ ID NO: 1548 - protein, 19 aa, synthetic construct
  REGION 1..19: note = Description of Artificial Sequence: Synthetic peptide
GGDYVWGTYRPHYYYGMDV

SEQ ID NO: 1549 - protein, 19 aa, synthetic construct
  REGION 1..19: note = Description of Artificial Sequence: Synthetic peptide
GGDYVFGTYRPHYYYGMDV

SEQ ID NO: 1550 - protein, 19 aa, synthetic construct
  REGION 1..19: note = Description of Artificial Sequence: Synthetic peptide
GGDYVFGTYRPHYYYGMDV

SEQ ID NO: 1551 - protein, 12 aa, synthetic construct
  REGION 1..12: note = Description of Artificial Sequence: Synthetic peptide
DRTIFGVVLGDY

SEQ ID NO: 1552 - protein, 12 aa, synthetic construct
  REGION 1..12: note = Description of Artificial Sequence: Synthetic peptide
DRTIFGVLLGDY

SEQ ID NO: 1553 - protein, 19 aa, synthetic construct
  REGION 1..19: note = Description of Artificial Sequence: Synthetic peptide
GGDYVWGTYRPHYYYGMDV

SEQ ID NO: 1554 - protein, 12 aa, synthetic construct
  REGION 1..12: note = Description of Artificial Sequence: Synthetic peptide
GKVAGMPEAFEI

SEQ ID NO: 1555 - protein, 20 aa, synthetic construct
  REGION 1..20: note = Description of Artificial Sequence: Synthetic peptide
GGDYVWGSYRPYYYYYGMDV

SEQ ID NO: 1556 - protein, 12 aa, synthetic construct
  REGION 1..12: note = Description of Artificial Sequence: Synthetic peptide
GKVAGMPEAFEI

SEQ ID NO: 1557 - protein, 12 aa, synthetic construct
  REGION 1..12: note = Description of Artificial Sequence: Synthetic peptide
GKVAGMPEAFEI

SEQ ID NO: 1558 - protein, 12 aa, synthetic construct
  REGION 1..12: note = Description of Artificial Sequence: Synthetic peptide
GKVAGMPEAFEI

SEQ ID NO: 1559 - protein, 12 aa, synthetic construct
  REGION 1..12: note = Description of Artificial Sequence: Synthetic peptide
GKVAGMPEAFEI

SEQ ID NO: 1560 - protein, 12 aa, synthetic construct
  REGION 1..12: note = Description of Artificial Sequence: Synthetic peptide
GKVAGMPEAFEI

SEQ ID NO: 1561 - protein, 12 aa, synthetic construct
  REGION 1..12: note = Description of Artificial Sequence: Synthetic peptide
GKVAGMPEAFEI

SEQ ID NO: 1562 - protein, 20 aa, synthetic construct
  REGION 1..20: note = Description of Artificial Sequence: Synthetic peptide
GGDYVWGSYRPYYYYYGMDV

SEQ ID NO: 1563 - protein, 20 aa, synthetic construct
  REGION 1..20: note = Description of Artificial Sequence: Synthetic peptide
GGDYVWGSYRPYYYYYGMDV

SEQ ID NO: 1564 - protein, 20 aa, synthetic construct
  REGION 1..20: note = Description of Artificial Sequence: Synthetic peptide
GGDYVWGSYRPYYYYYGMDV

SEQ ID NO: 1565 - protein, 20 aa, synthetic construct
  REGION 1..20: note = Description of Artificial Sequence: Synthetic peptide
GGDYVWGSYRPYYYYYGMDV

SEQ ID NO: 1566 - protein, 20 aa, synthetic construct
  REGION 1..20: note = Description of Artificial Sequence: Synthetic peptide
GGDYVWGSYRPYYYYYGMDV

SEQ ID NO: 1567 - protein, 20 aa, synthetic construct
  REGION 1..20: note = Description of Artificial Sequence: Synthetic peptide
GGDYVWGSYRPYYYYYGMDV

SEQ ID NO: 1568 - protein, 20 aa, synthetic construct
  REGION 1..20: note = Description of Artificial Sequence: Synthetic peptide
GGDYVFGSYRPYYYYYGMDV

SEQ ID NO: 1569 - protein, 20 aa, synthetic construct
  REGION 1..20: note = Description of Artificial Sequence: Synthetic peptide
GGDYVFGSYRPYYYYYGMDV

SEQ ID NO: 1570 - protein, 12 aa, synthetic construct
  REGION 1..12: note = Description of Artificial Sequence: Synthetic peptide
GKVAGMPEAFEI

SEQ ID NO: 1571 - DNA, 333 bp, synthetic construct
  misc_feature 1..333: note = Description of Artificial Sequence: Synthetic polynucleotide
  source 1..333: mol_type = other DNA
cagtctgtgctgactcagccaccctcagcgtctgggacccccgggcagagggtcaccatctcttgttctggaagtagctccaacatcggaagtaatactgtaaactggtaccagcacctcccaggaacggcccccaaactcctcatctatactaataatcagcggccctcaggggtccctgaccgattctctggctccaagtctggcacctcagcctcccttgccatcagtgggctccagtctgaggatgaggctgattatttctgtgcaacattcgatgacagcctgaatggtccggtattcggcggagggaccaagctgaccgtcctaggt

SEQ ID NO: 1572 - DNA, 324 bp, synthetic construct
  misc_feature 1..324: note = Description of Artificial Sequence: Synthetic polynucleotide
  source 1..324: mol_type = other DNA
gacatccagatgacccagtctccatcctccctgtctgcatctataggagacagagtcaccatcacttgccgggcaagtcaggacattagagattatttaggctggtatcagcagaaaccagggaaagcccctaagcgcctgatctatggtgcatccagtttgcaaagtggggtcccttcaaggttcagcggcagtggatctgggacagaattcactctcacaatcagcagcctgcagcctgaagatttcgcaacttattactgtctacagcataataattaccccttcactttcggccctgggaccaaagtggatatcaaacga

SEQ ID NO: 1573 - DNA, 324 bp, synthetic construct; identical to SEQ ID NO: 1572
  misc_feature 1..324: note = Description of Artificial Sequence: Synthetic polynucleotide
  source 1..324: mol_type = other DNA

SEQ ID NO: 1574 - DNA, 321 bp, synthetic construct
  misc_feature 1..321: note = Description of Artificial Sequence: Synthetic polynucleotide
  source 1..321: mol_type = other DNA
gacatccagatgacccagtctccatcctccctgtctgcatctgtaggagacagagtcaccatcacttgccaggcgagtcaggacattagcaactatttaaattggtatcagcagaaaccagggaaagcccctaagctcctgatctacgatgcatccaatttggaaacaggggtcccatcaaggttcagtggaagtggatctgggacagattttagtttcaccatcagcagcctgcagcctgaagatattgcaacatattactgtcaacagtatgatattctcctcactttcggcggagggaccaaggtggagatcaagcga

SEQ ID NO: 1575 - DNA, 342 bp, synthetic construct
  misc_feature 1..342: note = Description of Artificial Sequence: Synthetic polynucleotide
  source 1..342: mol_type = other DNA
gacatcgtgatgacccagtctccagactccctggctgtgtctctgggcgagagggccaccatcaactgcaagtccagccagagtgttttatccagctccaacaataagaactacatagcttggtaccagcagcaaccaggacatcctcctaagctgctcatttactgggcatctacccgggaatccggggtccctgaccgattcagtggcagcgggtctgggacagatttcactctcaccatcagcagcctgcaggctgaagatgtggcagttttttactgtcaacaatattatagtactccgtggacgttcggccaagggaccaaggtggaaatcaaacga

SEQ ID NO: 1576 - DNA, 342 bp, synthetic construct
  misc_feature 1..342: note = Description of Artificial Sequence: Synthetic polynucleotide
  source 1..342: mol_type = other DNA
gacatcgtgatgacccagtctccagactccctggctgtgtctctgggcgagagggccaccatcaactgcaagtccagccagagtgttttatccagctccaacaataagaactacatagcttggtaccagcagaaaccaggacatcctcctaagctgctcatttactgggcatctacccgggaatccggggtccctgaccgattcagtggcagcgggtctgggacagatttcactctcaccatcagcagcctgcaggctgaagatgtggcagttttttactgtcaacaatattatagtactccgtggacgttcggccaagggaccaaggtggaaatcaaacga

SEQ ID NO: 1577 - DNA, 342 bp, synthetic construct
  misc_feature 1..342: note = Description of Artificial Sequence: Synthetic polynucleotide
  source 1..342: mol_type = other DNA
gacatcgtgatgacccagtctccagactccctgtctgtgtctctgggcgagagggccaccatcaactgcaagtccagccagagtgttttatccagctccaacaataagaactacttagcttggtaccaacagaaaccaggacagcctcctaacctgctcatttactggacttctacccgagattccggggtccctgaccgattcagtggcagcgggtctgggacagatttcactctcaccatcaacagcctgcaggctgaagatgtggctgtttattactgtcagcaatattatcgtactccgtggacgttcggccaagggaccaaggtggaaatcaaacga

SEQ ID NO: 1578 - DNA, 342 bp, synthetic construct
  misc_feature 1..342: note = Description of Artificial Sequence: Synthetic polynucleotide
  source 1..342: mol_type = other DNA
gacatcgtgatgacccagtctccagactccctgtctgtgtctctgggcgagagggccaccatcaactgcaagtccagccagagtgttttatccagctccaacaataagaactacttagcttggtaccagcagaaaccaggacagcctcctaacctgctcatttactggacttctacccgagattccggggtccctgaccgattcagtggcagcgggtctgggacagatttcactctcaccatcaacagcctgcaggctgaagatgtggctgtttattactgtcagcaatattatcgtactccgtggacgttcggccaagggaccaaggtggaaatcaaacga

SEQ ID NO: 1579 - DNA, 327 bp, synthetic construct
  misc_feature 1..327: note = Description of Artificial Sequence: Synthetic polynucleotide
  source 1..327: mol_type = other DNA
gaaattgtgttgacgcagtctccaggcaccctgtctttgtctccaggggaaagagccaccctctcctgcagggccagtcagagtattagttacagttacttagcctggtaccagcagaaacctggccaggctccccggctcctcatctatggtgcatccagcagggccactggcatcccagacaggttcagtggcagtgggtctgggacagacttcactctcaccatcagcagacaggagcctgatgattttgcagtgtattactgtcagcagtatggtagttcaccgctcactttcggcggagggaccaaggtggagatcaaacga

SEQ ID NO: 1580 - DNA, 324 bp, synthetic construct
  misc_feature 1..324: note = Description of Artificial Sequence: Synthetic polynucleotide
  source 1..324: mol_type = other DNA
gaaatagtgatgacgcagtctccagccaccctgtctgtgtctccaggggaaagagccaccctctcctgcagggccagtcagagtgttagcagcaacttagcctggtaccagcagaaacctggccaggctcccaggctcctcatctatggtgcagccaccagggccactggtatcccagccagggtcagtggcagtgggtctgggacagagttcactctcaccatcagcagcctgcagtctgaagattttgcagtttattactgtcagcagtataataactggcctctcactttcggcggagggaccaaggtggagatcaaacga

SEQ ID NO: 1581 - DNA, 324 bp, synthetic construct
  misc_feature 1..324: note = Description of Artificial Sequence: Synthetic polynucleotide
  source 1..324: mol_type = other DNA
gacattcagatgacccagtctccatcctccctgtctgcatctgtaggagacagagtcaccatcacttgccgggcaagtcagggcattagaaatgagttaggctggtatcagcagaaaccagggaaagcccctaaacgcctgatctatggtgcatccagtttgcaaagtggggtcccatcaaggttcagcggcagtggatctgggacagagttcactctcacaatcagcagcctgcagcctgaagattttgtaacttattactgtctacagcataatagttacccattcactttcggccctgggaccaaagtggatgtcaaacga

SEQ ID NO: 1582 - DNA, 321 bp, synthetic construct
  misc_feature 1..321: note = Description of Artificial Sequence: Synthetic polynucleotide
  source 1..321: mol_type = other DNA
gacatccagatgacccagtctccatcctccctgtctgcatctgtgggggacagagtcaccatcacttgccaggcgagtcaggacattaccaactatttaaattggtatcagcagaaaccagggaaagcccctaaactcctgatctacgatgcttccaatttggagccaggggtcccatcaaggttcagtggaagtggatctgggacagattttactttcaccatcagcagcctgcagcctgaagatattgcaacatattactgtcaacagtatgatgatctattcactttcggccctgggaccaaagtggatatcaaacga

SEQ ID NO: 1583 - DNA, 324 bp, synthetic construct
  misc_feature 1..324: note = Description of Artificial Sequence: Synthetic polynucleotide
  source 1..324: mol_type = other DNA
gacatccagatgacccagtctccatcttccgtgtctgcatctgtaggagacagagtcaccatcacttgtcgggcgagtcagggtcttatcatctggttagcctggtatcagcagaaaccggggaaagcccctaaactcctgatctatgctgcatccagtttgcaaagtggggtcccatcaaggttcagcggcagtggctctgggacagatttcactctcaccatcagcagcctacagcctgaagattttgcaacttactattgtcaacagactaacagtttccctccgacgttcggccaagggaccaaggtggaaatcaaacga

SEQ ID NO: 1584 - DNA, 324 bp, synthetic construct; identical to SEQ ID NO: 1583
  misc_feature 1..324: note = Description of Artificial Sequence: Synthetic polynucleotide
  source 1..324: mol_type = other DNA

SEQ ID NO: 1585 - DNA, 324 bp, synthetic construct
  misc_feature 1..324: note = Description of Artificial Sequence: Synthetic polynucleotide
  source 1..324: mol_type = other DNA
gacattcagatgacccagtctccatcctccctgtctgcatctgtaggagacagagtcaccatcacttgccgggcaagtcagggcattagaaatgagttaggctggtatcagcagaaaccagggaaagcccctaaactcctgatctatggtgcatccagtttgcaaagtggggtcccatcaaggttcagcggcagtggatctgggacagagttcactctcacaatcagcagcctgcagcctgaagattttgtaacttattactgtctacagcataatagttacccattcactttcggccaagggaccaaagtggatgtcaaacga

SEQ ID NO: 1586 - DNA, 324 bp, synthetic construct; identical to SEQ ID NO: 1585
  misc_feature 1..324: note = Description of Artificial Sequence: Synthetic polynucleotide
  source 1..324: mol_type = other DNA

SEQ ID NO: 1587 - DNA, 324 bp, synthetic construct; identical to SEQ ID NO: 1585
  misc_feature 1..324: note = Description of Artificial Sequence: Synthetic polynucleotide
  source 1..324: mol_type = other DNA

SEQ ID NO: 1588 - DNA, 324 bp, synthetic construct
  misc_feature 1..324: note = Description of Artificial Sequence: Synthetic polynucleotide
  source 1..324: mol_type = other DNA
gacattcagatgacccagtctccatcctccctgtctgcatctgtaggagacagagtcaccatcacttgccgggcaagtcagggcattagaaatgagttaggctggtatcagcagaaaccagggaaagcccctaaactcctgatctatggtgcatccagtttgcaaagtggggtcccatcaaggttcagcggcagtggatctgggacagagttcactctcacaatcagcagcctgcagcctgaagattttgtaacttattactgtctacagcataatagttacccattcactttcggccctgggaccaaagtggatgtcaaacga

SEQ ID NO: 1589 - DNA, 324 bp, synthetic construct
  misc_feature 1..324: note = Description of Artificial Sequence: Synthetic polynucleotide
  source 1..324: mol_type = other DNA
gacattcagatgacccagtctccatcctccctgtctgcatctgtaggagacagagtcaccatcacttgccgggcaagtcagggcattagaaatgagttaggctggtatcagcagaaaccagggaaagcccctaaacgcctgatctatggtgcatccagtttgcaaagtggggtcccatcaaggttcagcggcagtggatctgggacagagttcactctcacaatcagcagcctgcagcctgaagattttgtaacttattactgtctacagcataatagttacccattcactttcggccaagggaccaaagtggatgtcaaacga

SEQ ID NO: 1590 - DNA, 324 bp, synthetic construct; identical to SEQ ID NO: 1585
  misc_feature 1..324: note = Description of Artificial Sequence: Synthetic polynucleotide
  source 1..324: mol_type = other DNA

SEQ ID NO: 1591 - DNA, 324 bp, synthetic construct
  misc_feature 1..324: note = Description of Artificial Sequence: Synthetic polynucleotide
  source 1..324: mol_type = other DNA
gacatccagatgacccagtctccatcctccctgtctgcatctataggagacagagtcaccatcacttgccgggcaagtcaggacattagagattatttaggctggtatcagcagaaaccagggaaagcccctaagctcctgatctatggtgcatccagtttgcaaagtggggtcccttcaaggttcagcggcagtggatctgggacagaattcactctcacaatcagcagcctgcagcctgaagatttcgcaacttattactgtctacagcataataattaccccttcactttcggccaagggaccaaagtggatatcaaacga

SEQ ID NO: 1592 - DNA, 324 bp, synthetic construct
  misc_feature 1..324: note = Description of Artificial Sequence: Synthetic polynucleotide
  source 1..324: mol_type = other DNA
gacatccagatgacccagtctccatcctccctgtctgcatctataggagacagagtcaccatcacttgccgggcaagtcaggacattagagattatttaggctggtatcagcagaaaccagggaaagcccctaagcgcctgatctatggtgcatccagtttgcaaagtggggtcccttcaaggttcagcggcagtggatctgggacagaattcactctcacaatcagcagcctgcagcctgaagatttcgcaacttattactgtctacagcataataattaccccttcactttcggccaagggaccaaagtggatatcaaacga

SEQ ID NO: 1593 - DNA, 324 bp, synthetic construct
  misc_feature 1..324: note = Description of Artificial Sequence: Synthetic polynucleotide
  source 1..324: mol_type = other DNA
gacatccagatgacccagtctccatcctccctgtctgcatctataggagacagagtcaccatcacttgccgggcaagtcaggacattagagattatttaggctggtatcagcagaaaccagggaaagcccctaagctcctgatctatggtgcatccagtttgcaaagtggggtcccttcaaggttcagcggcagtggatctgggacagaattcactctcacaatcagcagcctgcagcctgaagatttcgcaacttattactgtctacagcataataattaccccttcactttcggccctgggaccaaagtggatatcaaacga

SEQ ID NO: 1594 - DNA, 324 bp, synthetic construct; identical to SEQ ID NO: 1591
  misc_feature 1..324: note = Description of Artificial Sequence: Synthetic polynucleotide
  source 1..324: mol_type = other DNA

SEQ ID NO: 1595 - DNA, 324 bp, synthetic construct; identical to SEQ ID NO: 1591
  misc_feature 1..324: note = Description of Artificial Sequence: Synthetic polynucleotide
  source 1..324: mol_type = other DNA

SEQ ID NO: 1596 - DNA, 324 bp, synthetic construct; identical to SEQ ID NO: 1591
  misc_feature 1..324: note = Description of Artificial Sequence: Synthetic polynucleotide
  source 1..324: mol_type = other DNA

SEQ ID NO: 1597 - DNA, 324 bp, synthetic construct; identical to SEQ ID NO: 1591
  misc_feature 1..324: note = Description of Artificial Sequence: Synthetic polynucleotide
  source 1..324: mol_type = other DNA

SEQ ID NO: 1598 - DNA, 324 bp, synthetic construct
  misc_feature 1..324: note = Description of Artificial Sequence: Synthetic polynucleotide
  source 1..324: mol_type = other DNA
gacatccagatgacccagtctccatcctccctgtctgcatctataggagacagagtcaccatcacttgccgggcaagtcaggaccttagaaattatttaggctggtatcaccagaaaccagggaaagcccctaagcgcctgatctatggtgcatccagtttgcaaagtggggtcccttcaaggttcagcggcagtggatctgggacagaattcactctcacaatcagcagcctgcagcctgaagatttcgcaacttattactgtctacagcataataattaccccttcactttcggccctgggaccaaagtggatatcaaacga

SEQ ID NO: 1599 - DNA, 324 bp, synthetic construct
  misc_feature 1..324: note = Description of Artificial Sequence: Synthetic polynucleotide
  source 1..324: mol_type = other DNA
gacatccagatgacccagtctccatcctccctgtctgcatctataggagacagagtcaccatcacttgccgggcaagtcaggaccttagaaattatttaggctggtatcaacagaaaccagggaaagcccctaagctcctgatctatggtgcatccagtttgcaaagtggggtcccttcaaggttcagcggcagtggatctgggacagaattcactctcacaatcagcagcctgcagcctgaagatttcgcaacttattactgtctacagcataataattaccccttcactttcggccctgggaccaaagtggatatcaaacga

SEQ ID NO: 1600 - DNA, 324 bp, synthetic construct; identical to SEQ ID NO: 1599
  misc_feature 1..324: note = Description of Artificial Sequence: Synthetic polynucleotide
  source 1..324: mol_type = other DNA

SEQ ID NO: 1601 - DNA, 324 bp, synthetic construct
  misc_feature 1..324: note = Description of Artificial Sequence: Synthetic polynucleotide
  source 1..324: mol_type = other DNA
gacatccagatgacccagtctccatcctccctgtctgcatctataggagacagagtcaccatcacttgccgggcaagtcaggaccttagaaattatttaggctggtatcaccagaaaccagggaaagcccctaagctcctgatctatggtgcatccagtttgcaaagtggggtcccttcaaggttcagcggcagtggatctgggacagaattcactctcacaatcagcagcctgcagcctgaagatttcgcaacttattactgtctacagcataataattaccccttcactttcggccctgggaccaaagtggatatcaaacga

SEQ ID NO: 1602 - DNA, 324 bp, synthetic construct
  misc_feature 1..324: note = Description of Artificial Sequence: Synthetic polynucleotide
  source 1..324: mol_type = other DNA
gacatccagatgacccagtctccatcctccctgtctgcatctataggagacagagtcaccatcacttgccgggcaagtcaggaccttagaaattatttaggctggtatcaacagaaaccagggaaagcccctaagcgcctgatctatggtgcatccagtttgcaaagtggggtcccttcaaggttcagcggcagtggatctgggacagaattcactctcacaatcagcagcctgcagcctgaagatttcgcaacttattactgtctacagcataataattaccccttcactttcggccctgggaccaaagtggatatcaaacga

SEQ ID NO: 1603 - DNA, 324 bp, synthetic construct; identical to SEQ ID NO: 1602
  misc_feature 1..324: note = Description of Artificial Sequence: Synthetic polynucleotide
  source 1..324: mol_type = other DNA

SEQ ID NO: 1604 - DNA, 324 bp, synthetic construct; identical to SEQ ID NO: 1601
  misc_feature 1..324: note = Description of Artificial Sequence: Synthetic polynucleotide
  source 1..324: mol_type = other DNA

SEQ ID NO: 1605 - DNA, 324 bp, synthetic construct; identical to SEQ ID NO: 1598
  misc_feature 1..324: note = Description of Artificial Sequence: Synthetic polynucleotide
  source 1..324: mol_type = other DNA

SEQ ID NO: 1606 - DNA, 324 bp, synthetic construct; identical to SEQ ID NO: 1599
  misc_feature 1..324: note = Description of Artificial Sequence: Synthetic polynucleotide
  source 1..324: mol_type = other DNA

SEQ ID NO: 1607 - DNA, 324 bp, synthetic construct; identical to SEQ ID NO: 1599
  misc_feature 1..324: note = Description of Artificial Sequence: Synthetic polynucleotide
  source 1..324: mol_type = other DNA

SEQ ID NO: 1608 - DNA, 324 bp, synthetic construct
  misc_feature 1..324: note = Description of Artificial Sequence: Synthetic polynucleotide
  source 1..324: mol_type = other DNA
gacatccagatgacccagtctccatcctccctgtctgcatctataggagacagagtcaccatcacttgccgggcaagtcaggaccttagaaattatttaggctggtatcaacagaaaccagggaaagcccctaagctcctgatctatggtgcatccagtttgcaaagtggggtcccttcaaggttcagcggcagtggatctgggacagaattcactctcacaatcagcagcctgcagcctgaagatttcgcaacttattactgtctacagcataataattaccccttcactttcggccaagggaccaaagtggatatcaaacga

SEQ ID NO: 1609 - DNA, 324 bp, synthetic construct; identical to SEQ ID NO: 1599
  misc_feature 1..324: note = Description of Artificial Sequence: Synthetic polynucleotide
  source 1..324: mol_type = other DNA

SEQ ID NO: 1610 - DNA, 321 bp, synthetic construct
  misc_feature 1..321: note = Description of Artificial Sequence: Synthetic polynucleotide
  source 1..321: mol_type = other DNA
gacatccagatgacccagtctccatcctccctgtctgcatctgtaggagacagagtcaccatcacttgccaggcgagtcaggacattagcaactatttaaattggtatcagcagaaaccagggaaagcccctaagctcctgatctacgatgcatccaatttggaaacaggggtcccatcaaggttcagtggaagtggatctgggacagattttagtctcaccatcagcagcctgcagcctgaagattttgcaacatattactgtcaacagtatgatattctcctcactttcggcggagggaccaaggtggagatcaagcga

SEQ ID NO: 1611 - DNA, 321 bp, synthetic construct; identical to SEQ ID NO: 1610
  misc_feature 1..321: note = Description of Artificial Sequence: Synthetic polynucleotide
  source 1..321: mol_type = other DNA

SEQ ID NO: 1612 - DNA, 321 bp, synthetic construct
  misc_feature 1..321: note = Description of Artificial Sequence: Synthetic polynucleotide
  source 1..321: mol_type = other DNA
gacatccagatgacccagtctccatcctccctgtctgcatctgtaggagacagagtcaccatcacttgccaggcgagtcaggacattagcaactatttaaattggtatcagcagaaaccagggaaagcccctaagctcctgatctacgatgcatccaatttggaaacaggggtcccatcaaggttcagtggaagtggatctgggacagattttagtctcaccatcagcagcctgcagcctgaagatattgcaacatattactgtcaacagtatgatattctcctcactttcggcggagggaccaaggtggagatcaagcga

SEQ ID NO: 1613 - DNA, 321 bp, synthetic construct
  misc_feature 1..321: note = Description of Artificial Sequence: Synthetic polynucleotide
  source 1..321: mol_type = other DNA
gacatccagatgacccagtctccatcctccctgtctgcatctgtaggagacagagtcaccatcacttgccaggcgagtcaggacattagcaactatttaaattggtatcagcagaaaccagggaaagcccctaagctcctgatctacgatgcatccaatttggaaacaggggtcccatcaaggttcagtggaagtggatctgggacagattttagtttcaccatcagcagcctgcagcctgaagattttgcaacatattactgtcaacagtatgatattctcctcactttcggcggagggaccaaggtggagatcaagcga

SEQ ID NO: 1614 - DNA, 321 bp, synthetic construct; identical to SEQ ID NO: 1612
  misc_feature 1..321: note = Description of Artificial Sequence: Synthetic polynucleotide
  source 1..321: mol_type = other DNA

SEQ ID NO: 1615 - DNA, 321 bp, synthetic construct; identical to SEQ ID NO: 1613
  misc_feature 1..321: note = Description of Artificial Sequence: Synthetic polynucleotide
  source 1..321: mol_type = other DNA

SEQ ID NO: 1616 - DNA, 321 bp, synthetic construct; identical to SEQ ID NO: 1574
  misc_feature 1..321: note = Description of Artificial Sequence: Synthetic polynucleotide
  source 1..321: mol_type = other DNA

SEQ ID NO: 1617 - DNA, 321 bp, synthetic construct; identical to SEQ ID NO: 1610
  misc_feature 1..321: note = Description of Artificial Sequence: Synthetic polynucleotide
  source 1..321: mol_type = other DNA

SEQ ID NO: 1618 - DNA, 321 bp, synthetic construct; identical to SEQ ID NO: 1610
  misc_feature 1..321: note = Description of Artificial Sequence: Synthetic polynucleotide
  source 1..321: mol_type = other DNA

SEQ ID NO: 1619 - DNA, 324 bp, synthetic construct; identical to SEQ ID NO: 1572
  misc_feature 1..324: note = Description of Artificial Sequence: Synthetic polynucleotide
  source 1..324: mol_type = other DNA

SEQ ID NO: 1620 - DNA, 324 bp, synthetic construct; identical to SEQ ID NO: 1572
  misc_feature 1..324: note = Description of Artificial Sequence: Synthetic polynucleotide
  source 1..324: mol_type = other DNA

SEQ ID NO: 1621 - DNA, 324 bp, synthetic construct; identical to SEQ ID NO: 1591
  misc_feature 1..324: note = Description of Artificial Sequence: Synthetic polynucleotide
  source 1..324: mol_type = other DNA

SEQ ID NO: 1622 - DNA, 324 bp, synthetic construct; identical to SEQ ID NO: 1591
  misc_feature 1..324: note = Description of Artificial Sequence: Synthetic polynucleotide
  source 1..324: mol_type = other DNA

SEQ ID NO: 1623 - DNA, 324 bp, synthetic construct; identical to SEQ ID NO: 1593
  misc_feature 1..324: note = Description of Artificial Sequence: Synthetic polynucleotide
  source 1..324: mol_type = other DNA

SEQ ID NO: 1624 - DNA, 324 bp, synthetic construct; identical to SEQ ID NO: 1593
  misc_feature 1..324: note = Description of Artificial Sequence: Synthetic polynucleotide
  source 1..324: mol_type = other DNA

SEQ ID NO: 1625 - DNA, 324 bp, synthetic construct; identical to SEQ ID NO: 1593
  misc_feature 1..324: note = Description of Artificial Sequence: Synthetic polynucleotide
  source 1..324: mol_type = other DNA

SEQ ID NO: 1626 - DNA, 321 bp, synthetic construct
  misc_feature 1..321: note = Description of Artificial Sequence: Synthetic polynucleotide
  source 1..321: mol_type = other DNA
gacatccagatgacccagtctccatcctccctgtctgcatctgtgggggacagagtcaccatcacttgccaggcgagtcaggacattaccaactatttaaattggtatcagcagaaaccagggaaagcccctaaactcctgatctacgatgcttccaatttggagccaggggtcccatcaaggttcagtggaagtggatctgggacagattttactctcaccatcagcagcctgcagcctgaagattttgcaacatattactgtcaacagtatgatgatctattcactttcggccctgggaccaaagtggatatcaaacga

SEQ ID NO: 1627 - DNA, 321 bp, synthetic construct
  misc_feature 1..321: note = Description of Artificial Sequence: Synthetic polynucleotide
  source 1..321: mol_type = other DNA
gacatccagatgacccagtctccatcctccctgtctgcatctgtgggggacagagtcaccatcacttgccaggcgagtcaggacattaccaactatttaaattggtatcagcagaaaccagggaaagcccctaaactcctgatctacgatgcttccaatttggagccaggggtcccatcaaggttcagtggaagtggatctgggacagattttactctcaccatcagcagcctgcagcctgaagatattgcaacatattactgtcaacagtatgatgatctattcactttcggccctgggaccaaagtggatatcaaacga

SEQ ID NO: 1628 - DNA, 321 bp, synthetic construct; identical to SEQ ID NO: 1626
  misc_feature 1..321: note = Description of Artificial Sequence: Synthetic polynucleotide
  source 1..321: mol_type = other DNA

SEQ ID NO: 1629 - DNA, 321 bp, synthetic construct
  misc_feature 1..321: note = Description of Artificial Sequence: Synthetic polynucleotide
  source 1..321: mol_type = other DNA
gacatccagatgacccagtctccatcctccctgtctgcatctgtgggggacagagtcaccatcacttgccaggcgagtcaggacattaccaactatttaaattggtatcagcagaaaccagggaaagcccctaaactcctgatctacgatgcttccaatttggagccaggggtcccatcaaggttcagtggaagtggatctgggacagattttactttcaccatcagcagcctgcagcctgaagattttgcaacatattactgtcaacagtatgatgatctattcactttcggccctgggaccaaagtggatatcaaacga

SEQ ID NO: 1630 - DNA, 321 bp, synthetic construct; identical to SEQ ID NO: 1627
  misc_feature 1..321: note = Description of Artificial Sequence: Synthetic polynucleotide
  source 1..321: mol_type = other DNA

SEQ ID NO: 1631 - DNA, 321 bp, synthetic construct; identical to SEQ ID NO: 1629
  misc_feature 1..321: note = Description of Artificial Sequence: Synthetic polynucleotide
  source 1..321: mol_type = other DNA

SEQ ID NO: 1632 - DNA, 321 bp, synthetic construct; identical to SEQ ID NO: 1582
  misc_feature 1..321: note = Description of Artificial Sequence: Synthetic polynucleotide
  source 1..321: mol_type = other DNA

SEQ ID NO: 1633 - DNA, 321 bp, synthetic construct; identical to SEQ ID NO: 1626
  misc_feature 1..321: note = Description of Artificial Sequence: Synthetic polynucleotide
  source 1..321: mol_type = other DNA

SEQ ID NO: 1634 - DNA, 321 bp, synthetic construct; identical to SEQ ID NO: 1626
  misc_feature 1..321: note = Description of Artificial Sequence: Synthetic polynucleotide
  source 1..321: mol_type = other DNA

SEQ ID NO: 1635 - DNA, 321 bp, synthetic construct
  misc_feature 1..321: note = Description of Artificial Sequence: Synthetic polynucleotide
  source 1..321: mol_type = other DNA
gacatccagatgacccagtctccatcctccctgtctgcatctgtgggggacagagtcaccatcacttgccaggcgagtcaggacattaccaactatttaaattggtatcagcagaaaccagggaaagcccctaaactcctgatctacgatgcttccaatttggagccaggggtcccatcaaggttcagtggaagtggatctgggacagattttactctcaccatcagcagcctgcagcctgaagattttgcaacatattactgtcaacagtatgatgatctattcactttcggccaagggaccaaagtggatatcaaacga

SEQ ID NO: 1636 - DNA, 321 bp, synthetic construct; identical to SEQ ID NO: 1635
  misc_feature 1..321: note = Description of Artificial Sequence: Synthetic polynucleotide
  source 1..321: mol_type = other DNA

SEQ ID NO: 1637 - DNA, 324 bp, synthetic construct
  misc_feature 1..324: note = Description of Artificial Sequence: Synthetic polynucleotide
  source 1..324: mol_type = other DNA
gaaattgtgttgacgcagtctccaggcaccctgtctttgtctccaggggaaagagccaccctctcctgcagggccagtcagatttttaccagcacctacttagcctggtaccagcagaaacctggccaggctcccaggctcctcatctatggtgcatccagcagggccactggcatcccagacaggttcagtggcagtgggtctgggacagacttcactctcaccatcagcagattggagcctgaagattttgcagtgtattactgtcagcagtatggtagctcacctcgcttcggccaagggacacgactggagattaaacga

SEQ ID NO: 1638 - DNA, 324 bp, synthetic construct; identical to SEQ ID NO: 1637
  misc_feature 1..324: note = Description of Artificial Sequence: Synthetic polynucleotide
  source 1..324: mol_type = other DNA

SEQ ID NO: 1639 - DNA, 324 bp, synthetic construct; identical to SEQ ID NO: 1637
  misc_feature 1..324: note = Description of Artificial Sequence: Synthetic polynucleotide
  source 1..324: mol_type = other DNA

SEQ ID NO: 1640 - DNA, 324 bp, synthetic construct; identical to SEQ ID NO: 1637
  misc_feature 1..324: note = Description of Artificial Sequence: Synthetic polynucleotide
  source 1..324: mol_type = other DNA

SEQ ID NO: 1641 - DNA, 324 bp, synthetic construct
  misc_feature 1..324: note = Description of Artificial Sequence: Synthetic polynucleotide
  source 1..324: mol_type = other DNA
gaaatagtgatgacgcagtctccagccaccctgtctgtgtctccaggggaaagagccaccctctcctgcagggccagtcagagtgttagcagcaacttagcctggtaccagcagaaacctggccaggctcccaggctcctcatctatggtgcagccaccagggccactggtatcccagccaggttcagtggcagtgggtctgggacagagttcactctcaccatcagcagcctgcagtctgaagattttgcagtttattactgtcagcagtataataactggcctctcactttcggcggagggaccaaggtggagatcaaacga

SEQ ID NO: 1642 - DNA, 324 bp, synthetic construct; identical to SEQ ID NO: 1641
  misc_feature 1..324: note = Description of Artificial Sequence: Synthetic polynucleotide
  source 1..324: mol_type = other DNA

SEQ ID NO: 1643 - DNA, 324 bp, synthetic construct; identical to SEQ ID NO: 1641
  misc_feature 1..324: note = Description of Artificial Sequence: Synthetic polynucleotide
  source 1..324: mol_type = other DNA

SEQ ID NO: 1644 - DNA, 324 bp, synthetic construct; identical to SEQ ID NO: 1580
  misc_feature 1..324: note = Description of Artificial Sequence: Synthetic polynucleotide
  source 1..324: mol_type = other DNA

SEQ ID NO: 1645 - DNA, 324 bp, synthetic construct
  misc_feature 1..324: note = Description of Artificial Sequence: Synthetic polynucleotide
  source 1..324: mol_type = other DNA
gaaatagtgatgacgcagtctccagccaccctgtctgtgtctccaggggaaagagccaccctctcctgcagggccagtcagagtgttagcagcaacttagcctggtaccagcagaaacctggccaggctcccaggctcctcatctatggtgcagccaccagggccactggtatcccagccaggttcagtggcagtgggtctgggacagagttcactctcaccatcagcagcctggagcctgaagattttgcagtttattactgtcagcagtataataacttccctctcactttcggcggagggaccaaggtggagatcaaacga

SEQ ID NO: 1646 - DNA, 324 bp, synthetic construct
  misc_feature 1..324: note = Description of Artificial Sequence: Synthetic polynucleotide
  source 1..324: mol_type = other DNA
gaaatagtgatgacgcagtctccagccaccctgtctgtgtctccaggggaaagagccaccctctcctgcagggccagtcagagtgttagcagcaacttagcctggtaccagcagaaacctggccaggctcccaggctcctcatctatggtgcagccaccagggccactggtatcccagccaggttcagtggcagtgggtctgggacagagttcactctcaccatcagcagcctggagcctgaagattttgcagtttattactgtcagcagtataataactatcctctcactttcggcggagggaccaaggtggagatcaaacga

SEQ ID NO: 1647 - DNA, 324 bp, synthetic construct
  misc_feature 1..324: note = Description of Artificial Sequence: Synthetic polynucleotide
  source 1..324: mol_type = other DNA
gaaatagtgatgacgcagtctccagccaccctgtctgtgtctccaggggaaagagccaccctctcctgcagggccagtcagagtgttagcagcaacttagcctggtaccagcagaaacctggccaggctcccaggctcctcatctatggtgcagccaccagggccactggtatcccagccaggttcagtggcagtgggtctgggacagagttcactctcaccatcagcagcctggagcctgaagattttgcagtttattactgtcagcagtataataactggcctctcactttcggcggagggaccaaggtggagatcaaacga

SEQ ID NO: 1648 - DNA, 324 bp, synthetic construct; identical to SEQ ID NO: 1647
  misc_feature 1..324: note = Description of Artificial Sequence: Synthetic polynucleotide
  source 1..324: mol_type = other DNA

SEQ ID NO: 1649 - DNA, 327 bp, synthetic construct
  misc_feature 1..327: note = Description of Artificial Sequence: Synthetic polynucleotide
  source 1..327: mol_type = other DNA
gaaattgtgttgacgcagtctccaggcaccctgtctttgtctccaggggaaagagccaccctctcctgcagggccagtcagagtattagttacagttacttagcctggtaccagcagaaacctggccaggctccccggctcctcatctatggtgcatccagcagggccactggcatcccagacaggttcagtggcagtgggtctgggacagacttcactctcaccatcagcagactggagcctgatgattttgcagtgtattactgtcagcagtatggtagttcaccgctcactttcggcggagggaccaaggtggagatcaaacga

SEQ ID NO: 1650 - DNA, 327 bp, synthetic construct; identical to SEQ ID NO: 1579
  misc_feature 1..327: note = Description of Artificial Sequence: Synthetic polynucleotide
  source 1..327: mol_type = other DNA

SEQ ID NO: 1651 - DNA, 327 bp, synthetic construct; identical to SEQ ID NO: 1649
  misc_feature 1..327: note = Description of Artificial Sequence: Synthetic polynucleotide
  source 1..327: mol_type = other DNA

SEQ ID NO: 1652 - DNA, 327 bp, synthetic construct; identical to SEQ ID NO: 1649
  misc_feature 1..327: note = Description of Artificial Sequence: Synthetic polynucleotide
  source 1..327: mol_type = other DNA

SEQ ID NO: 1653 - DNA, 327 bp, synthetic construct; identical to SEQ ID NO: 1649
  misc_feature 1..327: note = Description of Artificial Sequence: Synthetic polynucleotide
  source 1..327: mol_type = other DNA

SEQ ID NO: 1654 - DNA, 327 bp, synthetic construct; identical to SEQ ID NO: 1579
  misc_feature 1..327: note = Description of Artificial Sequence: Synthetic polynucleotide
  source 1..327: mol_type = other DNA

SEQ ID NO: 1655 - DNA, 327 bp, synthetic construct; identical to SEQ ID NO: 1579
  misc_feature 1..327: note = Description of Artificial Sequence: Synthetic polynucleotide
  source 1..327: mol_type = other DNA

SEQ ID NO: 1656 - DNA, 342 bp, synthetic construct; identical to SEQ ID NO: 1575
  misc_feature 1..342: note = Description of Artificial Sequence: Synthetic polynucleotide
  source 1..342: mol_type = other DNA

SEQ ID NO: 1657 - DNA, 342 bp, synthetic construct; identical to SEQ ID NO: 1575
  misc_feature 1..342: note = Description of Artificial Sequence: Synthetic polynucleotide
  source 1..342: mol_type = other DNA

SEQ ID NO: 1658 - DNA, 342 bp, synthetic construct; identical to SEQ ID NO: 1575
  misc_feature 1..342: note = Description of Artificial Sequence: Synthetic polynucleotide
  source 1..342: mol_type = other DNA

SEQ ID NO: 1659 - DNA, 342 bp, synthetic construct; identical to SEQ ID NO: 1575
  misc_feature 1..342: note = Description of Artificial Sequence: Synthetic polynucleotide
  source 1..342: mol_type = other DNA

SEQ ID NO: 1660 - DNA, 342 bp, synthetic construct; identical to SEQ ID NO: 1575
  misc_feature 1..342: note = Description of Artificial Sequence: Synthetic polynucleotide
  source 1..342: mol_type = other DNA

SEQ ID NO: 1661 - DNA, 342 bp, synthetic construct; identical to SEQ ID NO: 1575
  misc_feature 1..342: note = Description of Artificial Sequence: Synthetic polynucleotide
  source 1..342: mol_type = other DNA

SEQ ID NO: 1662 - DNA, 342 bp, synthetic construct; identical to SEQ ID NO: 1575
  misc_feature 1..342: note = Description of Artificial Sequence: Synthetic polynucleotide
  source 1..342: mol_type = other DNA

SEQ ID NO: 1663 - DNA, 342 bp, synthetic construct; identical to SEQ ID NO: 1575
  misc_feature 1..342: note = Description of Artificial Sequence: Synthetic polynucleotide
  source 1..342: mol_type = other DNA

SEQ ID NO: 1664 - DNA, 342 bp, synthetic construct; identical to SEQ ID NO: 1575
  misc_feature 1..342: note = Description of Artificial Sequence: Synthetic polynucleotide
  source 1..342: mol_type = other DNA

SEQ ID NO: 1665 - DNA, 342 bp, synthetic construct
  misc_feature 1..342: note = Description of Artificial Sequence: Synthetic polynucleotide
  source 1..342: mol_type = other DNA
gacatcgtgatgacccagtctccagactccctggctgtgtctctgggcgagagggccaccatcaactgcaagtccagccagagtgttttatccagctccaacaataagaactacatagcttggtaccagcagaaaccaggacaacctcctaagctgctcatttactgggcatctacccgggaatccggggtccctgaccgattcagtggcagcgggtctgggacagatttcactctcaccatcagcagcctgcaggctgaagatgtggcagttttttactgtcaacaatattatagtactccgtggacgttcggccaagggaccaaggtggaaatcaaacga

SEQ ID NO: 1666 - DNA, 342 bp, synthetic construct; identical to SEQ ID NO: 1665
  misc_feature 1..342: note = Description of Artificial Sequence: Synthetic polynucleotide
  source 1..342: mol_type = other DNA

SEQ ID NO: 1667 - DNA, 342 bp, synthetic construct
  misc_feature 1..342: note = Description of Artificial Sequence: Synthetic polynucleotide
  source 1..342: mol_type = other DNA
gacatcgtgatgacccagtctccagactccctgtctgtgtctctgggcgagagggccaccatcaactgcaagtccagccagagtgttttatccagctccaacaataagaactacttagcttggtaccaacagaaaccaggacagcctcctaacctgctcatttactggacttctacccgagaatccggggtccctgaccgattcagtggcagcgggtctgggacagatttcactctcaccatcaacagcctgcaggctgaagatgtggctgtttattactgtcagcaatattatcgtactccgtggacgttcggccaagggaccaaggtggaaatcaaacga

SEQ ID NO: 1668 - DNA, 342 bp, synthetic construct; identical to SEQ ID NO: 1667
  misc_feature 1..342: note = Description of Artificial Sequence: Synthetic polynucleotide
  source 1..342: mol_type = other DNA

SEQ ID NO: 1669 - DNA, 342 bp, synthetic construct; identical to SEQ ID NO: 1577
  misc_feature 1..342: note = Description of Artificial Sequence: Synthetic polynucleotide
  source 1..342: mol_type = other DNA

SEQ ID NO: 1670 - DNA, 342 bp, synthetic construct; identical to SEQ ID NO: 1667
  misc_feature 1..342: note = Description of Artificial Sequence: Synthetic polynucleotide
  source 1..342: mol_type = other DNA

SEQ ID NO: 1671 - DNA, 342 bp, synthetic construct; identical to SEQ ID NO: 1667
  misc_feature 1..342: note = Description of Artificial Sequence: Synthetic polynucleotide
  source 1..342: mol_type = other DNA

SEQ ID NO: 1672 - DNA, 342 bp, synthetic construct; identical to SEQ ID NO: 1577
  misc_feature 1..342: note = Description of Artificial Sequence: Synthetic polynucleotide
  source 1..342: mol_type = other DNA

SEQ ID NO: 1673 - DNA, 342 bp, synthetic construct; identical to SEQ ID NO: 1577
  misc_feature 1..342: note = Description of Artificial Sequence: Synthetic polynucleotide
  source 1..342: mol_type = other DNA

SEQ ID NO: 1674 - DNA, 342 bp, synthetic construct
  misc_feature 1..342: note = Description of Artificial Sequence: Synthetic polynucleotide
  source 1..342: mol_type = other DNA
gacatcgtgatgacccagtctccagactccctggctgtgtctctgggcgagagggccaccatcaactgcaagtccagccagagtgttttatccagctccaacaataagaactacttagcttggtaccaacagaaaccaggacagcctcctaaactgctcatttactggacttctacccgagaatccggggtccctgaccgattcagtggcagcgggtctgggacagatttcactctcaccatcaacagcctgcaggctgaagatgtggctgtttattactgtcagcaatattatcgtactccgtggacgttcggccaagggaccaaggtggaaatcaaacga

SEQ ID NO: 1675 - DNA, 342 bp, synthetic construct; identical to SEQ ID NO: 1667
  misc_feature 1..342: note = Description of Artificial Sequence: Synthetic polynucleotide
  source 1..342: mol_type = other DNA

SEQ ID NO: 1676 - DNA, 342 bp, synthetic construct; identical to SEQ ID NO: 1576
  misc_feature 1..342: note = Description of Artificial Sequence: Synthetic polynucleotide
  source 1..342: mol_type = other DNA

SEQ ID NO: 1677 - DNA, 342 bp, synthetic construct; identical to SEQ ID NO: 1576
  misc_feature 1..342: note = Description of Artificial Sequence: Synthetic polynucleotide
  source 1..342: mol_type = other DNA

SEQ ID NO: 1678 - DNA, 342 bp, synthetic construct; identical to SEQ ID NO: 1576
  misc_feature 1..342: note = Description of Artificial Sequence: Synthetic polynucleotide
  source 1..342: mol_type = other DNA

SEQ ID NO: 1679 - DNA, 342 bp, synthetic construct; identical to SEQ ID NO: 1665
  misc_feature 1..342: note = Description of Artificial Sequence: Synthetic polynucleotide
  source 1..342: mol_type = other DNA

SEQ ID NO: 1680 - DNA, 342 bp, synthetic construct; identical to SEQ ID NO: 1665
  misc_feature 1..342: note = Description of Artificial Sequence: Synthetic polynucleotide
  source 1..342: mol_type = other DNA

SEQ ID NO: 1681 - DNA, 342 bp, synthetic construct; identical to SEQ ID NO: 1578
  misc_feature 1..342: note = Description of Artificial Sequence: Synthetic polynucleotide
  source 1..342: mol_type = other DNA

SEQ ID NO: 1682 - DNA, 342 bp, synthetic construct; identical to SEQ ID NO: 1578
  misc_feature 1..342: note = Description of Artificial Sequence: Synthetic polynucleotide
  source 1..342: mol_type = other DNA

SEQ ID NO: 1683 - DNA, 342 bp, synthetic construct; identical to SEQ ID NO: 1578
  misc_feature 1..342: note = Description of Artificial Sequence: Synthetic polynucleotide
  source 1..342: mol_type = other DNA

SEQ ID NO: 1684 - DNA, 342 bp, synthetic construct; identical to SEQ ID NO: 1578
  misc_feature 1..342: note = Description of Artificial Sequence: Synthetic polynucleotide
  source 1..342: mol_type = other DNA

SEQ ID NO: 1685 - DNA, 342 bp, synthetic construct; identical to SEQ ID NO: 1578
  misc_feature 1..342: note = Description of Artificial Sequence: Synthetic polynucleotide
  source 1..342: mol_type = other DNA

SEQ ID NO: 1686 - DNA, 342 bp, synthetic construct; identical to SEQ ID NO: 1578
  misc_feature 1..342: note = Description of Artificial Sequence: Synthetic polynucleotide
  source 1..342: mol_type = other DNA

SEQ ID NO: 1687 - DNA, 342 bp, synthetic construct; identical to SEQ ID NO: 1578
  misc_feature 1..342: note = Description of Artificial Sequence: Synthetic polynucleotide
  source 1..342: mol_type = other DNA

SEQ ID NO: 1688 - DNA, 342 bp, synthetic construct
  misc_feature 1..342: note = Description of Artificial Sequence: Synthetic polynucleotide
  source 1..342: mol_type = other DNA
gacatcgtgatgacccagtctccagactccctgtctgtgtctctgggcgagagggccaccatcaactgcaagtccagccagagtgttttatccagctccaacaataagaactacttagcttggtaccagcagaaaccaggacagcctcctaacctgctcatttactggacttctacccgagaatccggggtccctgaccgattcagtggcagcgggtctgggacagatttcactctcaccatcaacagcctgcaggctgaagatgtggctgtttattactgtcagcaatattatcgtactccgtggacgttcggccaagggaccaaggtggaaatcaaacga

SEQ ID NO: 1689 - DNA, 342 bp, synthetic construct; identical to SEQ ID NO: 1688
  misc_feature 1..342: note = Description of Artificial Sequence: Synthetic polynucleotide
  source 1..342: mol_type = other DNA

SEQ ID NO: 1690 - DNA, 342 bp, synthetic construct; identical to SEQ ID NO: 1688
  misc_feature 1..342: note = Description of Artificial Sequence: Synthetic polynucleotide
  source 1..342: mol_type = other DNA

SEQ ID NO: 1691 - DNA, 342 bp, synthetic construct; identical to SEQ ID NO: 1688
  misc_feature 1..342: note = Description of Artificial Sequence: Synthetic polynucleotide
  source 1..342: mol_type = other DNA

SEQ ID NO: 1692 - DNA, 342 bp, synthetic construct
  misc_feature 1..342: note = Description of Artificial Sequence: Synthetic polynucleotide
  source 1..342: mol_type = other DNA
gacatcgtgatgacccagtctccagactccctggctgtgtctctgggcgagagggccaccatcaactgcaagtccagccagagtgttttatccagctccaacaataagaactacttagcttggtaccagcagaaaccaggacagcctcctaaactgctcatttactggacttctacccgagattccggggtccctgaccgattcagtggcagcgggtctgggacagatttcactctcaccatcaacagcctgcaggctgaagatgtggctgtttattactgtcagcaatattatcgtactccgtggacgttcggccaagggaccaaggtggaaatcaaacga

SEQ ID NO: 1693 - DNA, 342 bp, synthetic construct
  misc_feature 1..342: note = Description of Artificial Sequence: Synthetic polynucleotide
  source 1..342: mol_type = other DNA
gacatcgtgatgacccagtctccagactccctggctgtgtctctgggcgagagggccaccatcaactgcaagtccagccagagtgttttatccagctccaacaataagaactacttagcttggtaccagcagaaaccaggacagcctcctaaactgctcatttactggacttctacccgagaatccggggtccctgaccgattcagtggcagcgggtctgggacagatttcactctcaccatcaacagcctgcaggctgaagatgtggctgtttattactgtcagcaatattatcgtactccgtggacgttcggccaagggaccaaggtggaaatcaaacga

SEQ ID NO: 1694 - DNA, 333 bp, synthetic construct
  misc_feature 1..333: note = Description of Artificial Sequence: Synthetic polynucleotide
  source 1..333: mol_type = other DNA
cagtctgtgctgactcagccaccctcagcgtctgggacccccgggcagagggtcaccatctcttgttctggaagtagctccaacatcggaagtcaaactgtaaactggtaccagcacctcccaggaacggcccccaaactcctcatctatactaataatcagcggccctcaggggtccctgaccgattctctggctccaagtctggcacctcagcctcccttgccatcagtgggctccagtctgaggatgaggctgattatttctgtgcaacattcgatgaaagcctgagtggtccggtattcggcggagggaccaagctgaccgtcctaggt

SEQ ID NO: 1695 - DNA, 333 bp, synthetic construct
  misc_feature 1..333: note = Description of Artificial Sequence: Synthetic polynucleotide
  source 1..333: mol_type = other DNA
cagtctgtgctgactcagccaccctcagcgtctgggacccccgggcagagggtcaccatctcttgttctggaagtagctccaacatcggaagtcaaactgtaaactggtaccagcacctcccaggaacggcccccaaactcctcatctatactaataatcagcggccctcaggggtccctgaccgattctctggctccaagtctggcacctcagcctcccttgccatcagtgggctccagtctgaggatgaggctgattatttctgtgcaacattcgatgaaagcctgcaaggtccggtattcggcggagggaccaagctgaccgtcctaggt

SEQ ID NO: 1696 - DNA, 333 bp, synthetic construct
  misc_feature 1..333: note = Description of Artificial Sequence: Synthetic polynucleotide
  source 1..333: mol_type = other DNA
cagtctgtgctgactcagccaccctcagcgtctgggacccccgggcagagggtcaccatctcttgttctggaagtagctccaacatcggaagtaattatgtaaactggtaccagcacctcccaggaacggcccccaaactcctcatctatactaataatcagcggccctcaggggtccctgaccgattctctggctccaagtctggcacctcagcctcccttgccatcagtgggctccagtctgaggatgaggctgattatttctgtgcaacattcgatgaaagcctgagtggtccggtattcggcggagggaccaagctgaccgtcctaggt

SEQ ID NO: 1697 - DNA, 333 bp, synthetic construct
  misc_feature 1..333: note = Description of Artificial Sequence: Synthetic polynucleotide
  source 1..333: mol_type = other DNA
cagtctgtgctgactcagccaccctcagcgtctgggacccccgggcagagggtcaccatctcttgttctggaagtagctccaacatcggaagtaattatgtaaactggtaccagcacctcccaggaacggcccccaaactcctcatctatactaataatcagcggccctcaggggtccctgaccgattctctggctccaagtctggcacctcagcctcccttgccatcagtgggctccagtctgaggatgaggctgattatttctgtgcaacattcgatgaaagcctgcaaggtccggtattcggcggagggaccaagctgaccgtcctaggt

SEQ ID NO: 1698 - DNA, 333 bp, synthetic construct
  misc_feature 1..333: note = Description of Artificial Sequence: Synthetic polynucleotide
  source 1..333: mol_type = other DNA
cagtctgtgctgactcagccaccctcagcgtctgggacccccgggcagagggtcaccatctcttgttctggaagtagctccaacatcggaagtcaaactgtaaactggtaccagcacctcccaggaacggcccccaaactcctcatctatactaataatcagcggccctcaggggtccctgaccgattctctggctccaagtctggcacctcagcctcccttgccatcagtgggctccagtctgaggatgaggctgattatttctgtgcaacattcgatgacagcctgaatggtccggtattcggcggagggaccaagctgaccgtcctaggt

SEQ ID NO: 1699 - DNA, 333 bp, synthetic construct
  misc_feature 1..333: note = Description of Artificial Sequence: Synthetic polynucleotide
  source 1..333: mol_type = other DNA
cagtctgtgctgactcagccaccctcagcgtctgggacccccgggcagagggtcaccatctcttgttctggaagtagctccaacatcggaagtaattatgtaaactggtaccagcacctcccaggaacggcccccaaactcctcatctatactaataatcagcggccctcaggggtccctgaccgattctctggctccaagtctggcacctcagcctcccttgccatcagtgggctccagtctgaggatgaggctgattatttctgtgcaacattcgatgacagcctgaatggtccggtattcggcggagggaccaagctgaccgtcctaggt

SEQ ID NO: 1700 - DNA, 333 bp, synthetic construct
  misc_feature 1..333: note = Description of Artificial Sequence: Synthetic polynucleotide
  source 1..333: mol_type = other DNA
cagtctgtgctgactcagccaccctcagcgtctgggacccccgggcagagggtcaccatctcttgttctggaagtagctccaacatcggaagtaatactgtaaactggtaccagcacctcccaggaacggcccccaaactcctcatctatactaataatcagcggccctcaggggtccctgaccgattctctggctccaagtctggcacctcagcctcccttgccatcagtgggctccagtctgaggatgaggctgattatttctgtgcaacattcgatgaaagcctgaatggtccggtattcggcggagggaccaagctgaccgtcctaggt

SEQ ID NO: 1701 - DNA, 333 bp, synthetic construct
  misc_feature 1..333: note = Description of Artificial Sequence: Synthetic polynucleotide
  source 1..333: mol_type = other DNA
cagtctgtgctgactcagccaccctcagcgtctgggacccccgggcagagggtcaccatctcttgttctggaagtagctccaacatcggaagtaatactgtaaactggtaccagcacctcccaggaacggcccccaaactcctcatctatactaataatcagcggccctcaggggtccctgaccgattctctggctccaagtctggcacctcagcctcccttgccatcagtgggctccagtctgaggatgaggctgattatttctgtgcaacattcgatgacagcctgcaaggtccggtattcggcggagggaccaagctgaccgtcctaggt

SEQ ID NO: 1702 - DNA, 333 bp, synthetic construct
  misc_feature 1..333: note = Description of Artificial Sequence: Synthetic polynucleotide
  source 1..333: mol_type = other DNA
cagtctgtgctgactcagccaccctcagcgtctgggacccccgggcagagggtcaccatctcttgttctggaagtagctccaacatcggaagtaatactgtaaactggtaccagcacctcccaggaacggcccccaaactcctcatctatactaataatcagcggccctcaggggtccctgaccgattctctggctccaagtctggcacctcagcctcccttgccatcagtgggctccagtctgaggatgaggctgattatttctgtgcaacattcgatgacagcctgagtggtccggtattcggcggagggaccaagctgaccgtcctaggt

SEQ ID NO: 1703 - DNA, 333 bp, synthetic construct
  misc_feature 1..333: note = Description of Artificial Sequence: Synthetic polynucleotide
  source 1..333: mol_type = other DNA
cagtctgtgctgactcagccaccctcagcgtctgggacccccgggcagagggtcaccatctcttgttctggaagtagctccaacatcggaagtaatactgtaaactggtaccagcacctcccaggaacggcccccaaactcctcatctatactaataatcagcggccctcaggggtccctgaccgattctctggctccaagtctggcacctcagcctcccttgccatcagtgggctccagtctgaggatgaggctgattatttctgtgcaacattcgatgacagcctgaatgctccggtattcggcggagggaccaagctgaccgtcctaggt

SEQ ID NO: 1704 - DNA, 333 bp, synthetic construct
  misc_feature 1..333: note = Description of Artificial Sequence: Synthetic polynucleotide
  source 1..333: mol_type = other DNA
cagtctgtgctgactcagccaccctcagcgtctgggacccccgggcagagggtcaccatctcttgttctggaagtagctccaacatcggaagtaatactgtaaactggtaccagcacctcccaggaacggcccccaaactcctcatctatactaataatcagcggccctcaggggtccctgaccgattctctggctccaagtctggcacctcagcctcccttgccatcagtgggctccagtctgaggatgaggctgattatttctgtgcaacattcgatagcagcctgaatggtccggtattcggcggagggaccaagctgaccgtcctaggt

SEQ ID NO: 1705 - DNA, 333 bp, synthetic construct
  misc_feature 1..333: note = Description of Artificial Sequence: Synthetic polynucleotide
  source 1..333: mol_type = other DNA
cagtctgtgctgactcagccaccctcagcgtctgggacccccgggcagagggtcaccatctcttgttctggaagtagctccaacatcggaagtaattatgtaaactggtaccagcacctcccaggaacggcccccaaactcctcatctatactaataatcagcggccctcaggggtccctgaccgattctctggctccaagtctggcacctcagcctcccttgccatcagtgggctccagtctgaggatgaggctgattatttctgtgcaacattcgatagcagcctgaatgctccggtattcggcggagggaccaagctgaccgtcctaggt

SEQ ID NO: 1706 - DNA, 333 bp, synthetic construct; identical to SEQ ID NO: 1705
  misc_feature 1..333: note = Description of Artificial Sequence: Synthetic polynucleotide
  source 1..333: mol_type = other DNA

SEQ ID NO: 1707 - DNA, 333 bp, synthetic construct; identical to SEQ ID NO: 1694
  misc_feature 1..333: note = Description of Artificial Sequence: Synthetic polynucleotide
  source 1..333: mol_type = other DNA

SEQ ID NO: 1708 - DNA, 324 bp, synthetic construct
  misc_feature 1..324: note = Description of Artificial Sequence: Synthetic polynucleotide
  source 1..324: mol_type = other DNA
gacatccagatgacccagtctccatcctccctgtctgcatctataggagacagagtcaccatcacttgccgggcaagtcaggaccttagaaattatttaggctggtatcaacagaaaccagggaaagcccctaagcgcctgatctatggtgcatccagtttgcaaagtggggtcccttcaaggttcagcggcagtggatctgggacagaattcactctcacaatcagcagcctgcagcctgaagatttcgcaacttattactgtctacagcataataattaccccttcactttcggccaagggaccaaagtggatatcaaacga

SEQ ID NO: 1709 - DNA, 324 bp, synthetic construct; identical to SEQ ID NO: 1592
  misc_feature 1..324: note = Description of Artificial Sequence: Synthetic polynucleotide
  source 1..324: mol_type = other DNA

SEQ ID NO: 1710 - DNA, 333 bp, synthetic construct
  misc_feature 1..333: note = Description of Artificial Sequence: Synthetic polynucleotide
  source 1..333: mol_type = other DNA
cagtctgtgctgactcagccaccctcagcgtctgggacccccgggcagagggtcaccatctcttgttctggaagtagctccaacatcggaagtaatactgtaaactggtaccagcaactcccaggaacggcccccaaactcctcatctatactaataatcagcggccctcaggggtccctgaccgattctctggctccaagtctggcacctcagcctcccttgccatcagtgggctccagtctgaggatgaggctgattatttctgtgcaacattcgatagcagcctgagtggtccggtattcggcggagggaccaagctgaccgtcctaggt

SEQ ID NO: 1711 - DNA, 324 bp, synthetic construct
  misc_feature 1..324: note = Description of Artificial Sequence: Synthetic polynucleotide
  source 1..324: mol_type = other DNA
gacatccagctgacccagtctccatcctccctgtctgcatctgtaggagacagagtcactatcacttgccgggcaagtcagaccattagcaggtttttaaattggtatcagcagaaacctgggaaagcccctgagctcctgatctatgttgcatccagtttgcaaagtggggtcccatcaagattcagtggcagtggttctgggacagatttcactctcaccatcagcagtctgcaacctgaagattttgcaacttactactgtcaacagagttacagtaccctgatcagttttggccaggggaccaagctggagatcacacga

SEQ ID NO: 1712 - DNA, 333 bp, synthetic construct
  misc_feature 1..333: note = Description of Artificial Sequence: Synthetic polynucleotide
  source 1..333: mol_type = other DNA
cagtctgtgttgacgcagccgccctcagtgtctgcggccccaggacagaaggtcaccatctcctgctctggaagcagctccaacattggaaataattatgtatcctggtatgagcagttcccaggaacagcccccaaactcctcatttatgacaataataagcgaccctcagggattcctgaccgattctctggctccaagtctggcacgtcagccaccctgggcatcaccggactccagactggggacgaggccgattattactgcggaacatgggatagcagcctgagtgctgtggtattcggcggagggaccaaactgaccgtcctaggt

SEQ ID NO: 1713 - DNA, 324 bp, synthetic construct
  misc_feature 1..324: note = Description of Artificial Sequence: Synthetic polynucleotide
  source 1..324: mol_type = other DNA
gacatccagctgacccagtctccatcctccctgtctgcatctgtaggagacagagtcactatcacttgccgggcaagtcagaccattagcaggtttttaaattggtatcagcagaaacctgggaaagcccctgagctcctgatctatgttgcatccagtttgcaaagtggggtcccatcaagattcagtggcagtggttctgggacagatttcactctcaccatcagcagtctgcaacctgaagattttgcaacttactactgtcaacagagttacagtaccctgatcagttttggccaggggaccaagctggagatcaaacga

SEQ ID NO: 1714 - DNA, 324 bp, synthetic construct; identical to SEQ ID NO: 1713
  misc_feature 1..324: note = Description of Artificial Sequence: Synthetic polynucleotide
  source 1..324: mol_type = other DNA

SEQ ID NO: 1715 - DNA, 324 bp, synthetic construct; identical to SEQ ID NO: 1711
  misc_feature 1..324: note = Description of Artificial Sequence: Synthetic polynucleotide
  source 1..324: mol_type = other DNA

SEQ ID NO: 1716 - DNA, 324 bp, synthetic construct
  misc_feature 1..324: note = Description of Artificial Sequence: Synthetic polynucleotide
  source 1..324: mol_type = other DNA
gacatccagctgacccagtctccatcctccctgtctgcatctgtaggagacagagtcactatcacttgccgggcaagtcagaccattagcaggtttttaaattggtatcagcagaaacctgggaaagcccctaagctcctgatctatgttgcatccagtttgcaaagtggggtcccatcaagattcagtggcagtggttctgggacagatttcactctcaccatcagcagtctgcaacctgaagattttgcaacttactactgtcaacagagttacagtaccctgatcagttttggccaggggaccaagctggagatcaaacga

SEQ ID NO: 1717 - DNA, 324 bp, synthetic construct; identical to SEQ ID NO: 1713
  misc_feature 1..324: note = Description of Artificial Sequence: Synthetic polynucleotide
  source 1..324: mol_type = other DNA

SEQ ID NO: 1718 - DNA, 324 bp, synthetic construct; identical to SEQ ID NO: 1713
  misc_feature 1..324: note = Description of Artificial Sequence: Synthetic polynucleotide
  source 1..324: mol_type = other DNA

SEQ ID NO: 1719 - DNA, 333 bp, synthetic construct
  misc_feature 1..333: note = Description of Artificial Sequence: Synthetic polynucleotide
  source 1..333: mol_type = other DNA
cagtctgtgttgacgcagccgccctcagtgtctgcggccccaggacagaaggtcaccatctcctgctctggaagcagctccaacattggaaataattatgtatcctggtatcagcagctcccaggaacagcccccaaactcctcatttatgacaataataagcgaccctcagggattcctgaccgattctctggctccaagtctggcacgtcagccaccctgggcatcaccggactccagactggggacgaggccgattattactgcggaacatgggatagcagcctgagtgctgtggtattcggcggagggaccaaactgaccgtcctaggt

SEQ ID NO: 1720 - DNA, 333 bp, synthetic construct; identical to SEQ ID NO: 1719
  misc_feature 1..333: note = Description of Artificial Sequence: Synthetic polynucleotide
  source 1..333: mol_type = other DNA

SEQ ID NO: 1721 - DNA, 333 bp, synthetic construct; identical to SEQ ID NO: 1712
  misc_feature 1..333: note = Description of Artificial Sequence: Synthetic polynucleotide
  source 1..333: mol_type = other DNA

SEQ ID NO: 1722 - DNA, 333 bp, synthetic construct
  misc_feature 1..333: note = Description of Artificial Sequence: Synthetic polynucleotide
  source 1..333: mol_type = other DNA
cagtctgtgttgacgcagccgccctcagtgtctgcggccccaggacagaaggtcaccatctcctgctctggaagcagctccaacattggaaataattatgtatcctggtatcagcagctcccaggaacagcccccaaactcctcatttatgacaataataagcgaccctcagggattcctgaccgattctctggctccaagtctggcacgtcagccaccctggccatcaccggactccagactggggacgaggccgattattactgcggaacattcgaaagcagcctgagtgctgtggtattcggcggagggaccaaactgaccgtcctaggt

SEQ ID NO: 1723 - DNA, 333 bp, synthetic construct
  misc_feature 1..333: note = Description of Artificial Sequence: Synthetic polynucleotide
  source 1..333: mol_type = other DNA
cagtctgtgttgacgcagccgccctcagtgtctgcggccccaggacagaaggtcaccatctcctgctctggaagcagctccaacattggaaataattatgtatcctggtatcagcagctcccaggaacagcccccaaactcctcatttatgacaataataagcgaccctcagggattcctgaccgattctctggctccaagtctggcacgtcagccaccctggccatcaccggactccagactggggacgaggccgattattactgcggaacatgggatagcagcctgagtgctgtggtattcggcggagggaccaaactgaccgtcctaggt

SEQ ID NO: 1724 - DNA, 333 bp, synthetic construct; identical to SEQ ID NO: 1723
  misc_feature 1..333: note = Description of Artificial Sequence: Synthetic polynucleotide
  source 1..333: mol_type = other DNA

SEQ ID NO: 1725 - DNA, 333 bp, synthetic construct; identical to SEQ ID NO: 1719
  misc_feature 1..333: note = Description of Artificial Sequence: Synthetic polynucleotide
  source 1..333: mol_type = other DNA

SEQ ID NO: 1726 - DNA, 333 bp, synthetic construct; identical to SEQ ID NO: 1722
  misc_feature 1..333: note = Description of Artificial Sequence: Synthetic polynucleotide
  source 1..333: mol_type = other DNA

SEQ ID NO: 1727 - DNA, 324 bp, synthetic construct
  misc_feature 1..324: note = Description of Artificial Sequence: Synthetic polynucleotide
  source 1..324: mol_type = other DNA
gacatccagctgacccagtctccatcctccctgtctgcatctgtaggagacagagtcactatcacttgccgggcaagtcagaccattagcaggtttttaaattggtatcagcagaaacctgggaaagcccctaagctcctgatctatgttgcatccagtttgcaaagtggggtcccatcaagattcagtggcagtggttctgggacagatttcactctcaccatcagcagtctgcaacctgaagattttgcaacttactactgtcaacagagttacagtaccctgctcagttttggccaggggaccaagctggagatcaaacga

SEQ ID NO: 1728 - DNA, 384 bp, synthetic construct
  misc_feature 1..384: note = Description of Artificial Sequence: Synthetic polynucleotide
  source 1..384: mol_type = other DNA
cagatgcaggtggtgcagtctggggctgaggtgaagaagcctggggcctcagtgaaggtctcctgcaaggcttccggatacaccttcaccggctactatatgcattgggtgcgacaggcccctggacaagggcttgagtggatgggatggatcaaccctaacagtggtggcacaaactatgcacagaagtttcagggcagggtcaccatgaccagggacacgtccatcagtacagcctacatggagctgagcaggctgaggtctgacgacacggccgtgtattactgtgcgagagggggggattacgtttgggggacttatcggcctcactactactacggtatggacgtctggggccaagggaccacggtcaccgtctcctca

SEQ ID NO: 1729 - DNA, 363 bp, synthetic construct
  misc_feature 1..363: note = Description of Artificial Sequence: Synthetic polynucleotide
  source 1..363: mol_type = other DNA
caggtgcagctggtggagtctgggggaggcgtggtccagcctgggaggtccctgagactctcctgtgcagcgtctggattcactttcagtaactttggcatgcactgggtccgccaggctccaggcaaggggctggagtgggtggcagttatatggtatgatggaagtaatgaaaactatgcagactccgtgaagggccgattcaccatctccagagacaattccaagaatacgctgtatctgcacatgaacagcctgagagtcgcggacacggctgtgtattattgtgcgcgagatgggacgatctttggagtggtcttgggggactactggggccagggaaccctggtcaccgtctcctca

SEQ ID NO: 1730 - DNA, 363 bp, synthetic construct
  misc_feature 1..363: note = Description of Artificial Sequence: Synthetic polynucleotide
  source 1..363: mol_type = other DNA
caggtgcagctggtggagtctgggggaggcgtggtccagcctgggaggtccctgagactctcctgtgcagcgtctggattcaccttcagttactttggcatgcactgggtccgccaggctccaggcaaggggctggagtgggtggcagttatatggtatgatggaagtaataaatactatgcagactccgtgaagggccgcttcaccatctccagagacaattccaagaacacgctgtatctgcaaatgaacagcctgagagccgaggacacggctgtgtattactgtgcgcgagatgggacgatttttggagtgctcttgggggactactggggccagggaaccctggtcaccgtctcctca

SEQ ID NO: 1731 - DNA, 360 bp, synthetic construct
  misc_feature 1..360: note = Description of Artificial Sequence: Synthetic polynucleotide
  source 1..360: mol_type = other DNA
caggtgcaactggtggagtctgggggaggcgtggtccagcctgggaggtccctgagactctcctgtgcagcgtctggattcaccttcagtagctatggcatgcactgggtccgccaggctccaggcaaggggctggagtgggtggcagttatatggtatgatggaagtaataaatactatgcagactccgtgaagggccgattcaccatctccagcgacaattccaagaacacgctgtatctgcaaatgaacagcctgagagccgaggacacggctgtgtattactgtgcgagagataggacgatttttggagtggttcttgactactggggccagggaaccctggtcaccgtctcctca

SEQ ID NO: 1732 - DNA, 369 bp, synthetic construct
  misc_feature 1..369: note = Description of Artificial Sequence: Synthetic polynucleotide
  source 1..369: mol_type = other DNA
caggtgccgctggtgcagtctggggctgaggtgaagaagcctggggcctcagtgaaggtctcctgcaaggcttctggatacaccttcaccggctactatatccactgggtgcgacaggcccctggacaagggcttgagtggatggggtggatcaaccctgacagtggtggcacagactattcacagaggtttcagggcaggttcaccatgaccagggacacgtccatcagcacagcctacatggaactgaacaggctgagatctgacgacacggccgtgtattactgtgcgagagaggccacgatttttggaatggttattgtaccgtttgactactggggccagggaaccctggtcaccgtctcctca

SEQ ID NO: 1733 - DNA, 369 bp, synthetic construct
  misc_feature 1..369: note = Description of Artificial Sequence: Synthetic polynucleotide
  source 1..369: mol_type = other DNA
caggtgccgctggtgcagtctggggctgaggtgaagaagcctggggcctcagtgaaggtctcctgcaaggcttctggatacaccttcaccggctactatatccactgggtgcgacaggcccctggacaaggacttgagtggatggggtggatcaaccctgacagtggtggcacagactattcacagaggtttcagggcaggttcaccatgaccagggacacgtccatcagcacagcctacatggaactgagcaggctgagatctgacgacacggccgtgtattactgtgcgagagaggccacgatttttggaatggttattgtaccgtttgactactggggccagggaaccctggtcaccgtctcctca

SEQ ID NO: 1734 - DNA, 369 bp, synthetic construct
  misc_feature 1..369: note = Description of Artificial Sequence: Synthetic polynucleotide
  source 1..369: mol_type = other DNA
caggtgccgctggtacagtctggggctgaggtgaagaagcctggggcctcagtgaaggtctcctgcaaggcttctggatacaccttcaccggctactatatacactgggtgcgtcaggcccctggacaagggcttgtgtggatggggtggatcagccctaacagtggtgacacaagctatgcacagaagtttcaggacagggtcaccatgaccagggacacgtccatcagcacagcctatatggagctgagcagactgagatctgacgacacggccgtgtatttctgtacgagagaggccacgatttttggaatgcttattgtaccatttgactactggggccagggaaccctggtcaccgtctcctca

SEQ ID NO: 1735 - DNA, 369 bp, synthetic construct
  misc_feature 1..369: note = Description of Artificial Sequence: Synthetic polynucleotide
  source 1..369: mol_type = other DNA
caggtgccgctggtgcagtctggggctgaggtgaagaagcctggggcctcagtgaaggtctcctgcaaggcttctggatacaccttcaccggctactatatacactgggtgcgtcaggcccctggacaagggcttgagtggatggggtggataagccctaacaatggtgacacaaactatgcacagaagtttcaggacagggtcaccatgaccagggacacgtccatcagcacagcctatatggagctgagcaggctgagatctgacgacacggccgtgtattactgtacgagagaggccacgatttttggaatgcttattgtaccatttgactactggggccagggaaccctggtcaccgtctcctca

SEQ ID NO: 1736 - DNA, 378 bp, synthetic construct
  misc_feature 1..378: note = Description of Artificial Sequence: Synthetic polynucleotide
  source 1..378: mol_type = other DNA
caggtgcagttgcaggagtcgggcccaggactggtgaagccttcacagaccctgtccctcacctgcactgtctctggtgactccatcagcagtggtggttactactggagctggatccgccagcacccagggaagggcctggagtggattgggtacatctattacagtgggagcacctactacaacccgtccctcaagagtcgagttaccatatcagtagacacgtctaagaaccagttctccctgaagctgagctctgtgactgccgcggacacggccgtgtattactgtgcgagagatcgtattacgatttttggagtggttatggggggcggtatggacgtctggggccaagggaccacggtcaccgtctcctca

SEQ ID NO: 1737 - DNA, 360 bp, synthetic construct
  misc_feature 1..360: note = Description of Artificial Sequence: Synthetic polynucleotide
  source 1..360: mol_type = other DNA
caggtgcagctggtggagtctgggggaggcgtggtccagcctgggaggtccctgagactctcctgtgcagcatctggattcaccttcagtaactatggcatgcactgggtccgccaggctccaggcgaggggctggagtgggtggcagctatatggtttgatggaagtgataaatactatgcagactccgtgaagggccgattcaccatctccagagacaactccaagaacacgctgtatctgcaaatgaacagcctgagagccgaggacacggctgtgtattactgtgcgagagatcaggcgatttttggagtggtccccgactactggggccagggaaccctggtcaccgtctcctca

SEQ ID NO: 1738 - DNA, 363 bp, synthetic construct; identical to SEQ ID NO: 1730
  misc_feature 1..363: note = Description of Artificial Sequence: Synthetic polynucleotide
  source 1..363: mol_type = other DNA

SEQ ID NO: 1739 - DNA, 360 bp, synthetic construct
  misc_feature 1..360: note = Description of Artificial Sequence: Synthetic polynucleotide
  source 1..360: mol_type = other DNA
caggtgcagctggtggagtctgggggaggcgtggtccagcctgggaggtccctgagactctcctgtgcagcgtctggattctccttcagtagctatggcatgcactgggtccgccagcctccaggcaaggggctggagtgggtggcagctatatggtatgatggaaataataaatactatgcagactccgtgaagggccgattcaccatctccagagacagttccaagaacacgctgtatctgcaaatgaacagcctgagagccgaggacacggctgtgtattactgtgcgagagatcggacgatttttggagtggtccttgagtacctcggccagggaaccctggtcaccgtctcctca

SEQ ID NO: 1740 - DNA, 351 bp, synthetic construct
  misc_feature 1..351: note = Description of Artificial Sequence: Synthetic polynucleotide
  source 1..351: mol_type = other DNA
caggtgcagctgcaggagtcgggcccaggactggtgaagccttcggagaccctgtccctcacctgcactgtctctcagggctccatcagtagttactactggagctggatccggcagcccgccgggaagggactagagtggattggccgtatctataccagtgggagcaccaactacaacccctccctcaagagtcgagtcaccatgtcaatagacacgtccaagaaccagttctccctgaaactgaactctgtgaccgccgcggacacggccgtgtattactgtgcgagagatgtagcagtggctggctttgactactggggccagggaaccctggtcaccgtctcctca

SEQ ID NO: 1741 - DNA, 351 bp, synthetic construct
  misc_feature 1..351: note = Description of Artificial Sequence: Synthetic polynucleotide
  source 1..351: mol_type = other DNA
caggtgcagctgcaggagtcgggcccaggactggtgaagccttcggagaccctgtccctcacctgcactgtctctgggggctccatcagtagttactactggagctggatccggcagcccgccgggaagggactagagtggattggccgtatctataccagtgggagcaccaactacaacccctccctcaagagtcgagtcaccatgtcaatagacacgtccaagaaccagttctccctgaaactgaactctgtgaccgccgcggacacggccgtgtattactgtgcgagagatgtagcagtggctggctttgactactggggccagggaaccctggtcaccgtctcctca

SEQ ID NO: 1742 - DNA, 363 bp, synthetic construct
  misc_feature 1..363: note = Description of Artificial Sequence: Synthetic polynucleotide
  source 1..363: mol_type = other DNA
caggtgcagctggtggagtctgggggaggcgtggtccagcctgggaggtccctgagactctcctgtgcagcgtctggattcaccttcagttactttggcatgcactgggtccgccaggctccaggcaaggggctggagtgggtggcagttatatggtatgatgcaagtaataaatactatgcagacgccgtgaagggccgcttcaccatctccagagacaattccaagaacacgctgtatctgcaaatgaacagcctgagagccgaggacacggctgtgtattactgtgcgcgagatgggacgatttttggagtgctcttgggggactactggggccagggaaccctggtcaccgtctcctca

SEQ ID NO: 1743 - DNA, 363 bp, synthetic construct
  misc_feature 1..363: note = Description of Artificial Sequence: Synthetic polynucleotide
  source 1..363: mol_type = other DNA
caggtgcagctggtggagtctgggggaggcgtggtccagcctgggaggtccctgagactctcctgtgcagcgtctggattcaccttcagttactttggcatgcactgggtccgccaggctccaggcaaggggctggagtgggtggcagttatatggtatgatgcaagtaataaatactatgcagactccgtgaagggccgcttcaccatctccagagacaattccaagaacacgctgtatctgcaaatgaacagcctgagagccgaggacacggctgtgtattactgtgcgcgagatgggacgatttttggagtgctcttgggggactactggggccagggaaccctggtcaccgtctcctca

SEQ ID NO: 1744 - DNA, 363 bp, synthetic construct
  misc_feature 1..363: note = Description of Artificial Sequence: Synthetic polynucleotide
  source 1..363: mol_type = other DNA
caggtgcagctggtggagtctgggggaggcgtggtccagcctgggaggtccctgagactctcctgtgcagcgtctggattcaccttcagttactttggcatgcactgggtccgccaggctccaggcaaggggctggagtgggtggcagttatatggtatgatggaagtaataaatactatgcagacgccgtgaagggccgcttcaccatctccagagacaattccaagaacacgctgtatctgcaaatgaacagcctgagagccgaggacacggctgtgtattactgtgcgcgagatgggacgatttttggagtgctcttgggggactactggggccagggaaccctggtcaccgtctcctca

SEQ ID NO: 1745 - DNA, 363 bp, synthetic construct; identical to SEQ ID NO: 1742
  misc_feature 1..363: note = Description of Artificial Sequence: Synthetic polynucleotide
  source 1..363: mol_type = other DNA

SEQ ID NO: 1746 - DNA, 363 bp, synthetic construct; identical to SEQ ID NO: 1742
  misc_feature 1..363: note = Description of Artificial Sequence: Synthetic polynucleotide
  source 1..363: mol_type = other DNA

SEQ ID NO: 1747 - DNA, 363 bp, synthetic construct
  misc_feature 1..363: note = Description of Artificial Sequence: Synthetic polynucleotide
  source 1..363: mol_type = other DNA
caggtgcagctggtggagtctgggggaggcgtggtccagcctgggaggtccctgagactctcctgtgcagcgtctggattcaccttcagttactttggcatgcactgggtccgccaggctccaggcaaggggctggagtgggtggcagttatatggtatgatgcaagtaataaatactatgcagacgccgtgaagggccgcttcaccatctccagagacaattccaagaacacgctgtatctgcaaatgaacagcctgagagccgaggacacggctgtgtattactgtgcgcgagataggacgatttttggagtgctcttgggggactactggggccagggaaccctggtcaccgtctcctca

SEQ ID NO: 1748 - DNA, 363 bp, synthetic construct
  misc_feature 1..363: note = Description of Artificial Sequence: Synthetic polynucleotide
  source 1..363: mol_type = other DNA
caggtgcagctggtggagtctgggggaggcgtggtccagcctgggaggtccctgagactctcctgtgcagcgtctggattcactttcagtaactttggcatgcactgggtccgccaggctccaggcaaggggctggagtgggtggcagttatatggtatgatgcaagtaatgaaaactatgcagacgccgtgaagggccgattcaccatctccagagacaattccaagaatacgctgtatctgcaaatgaacagcctgagagtcgcggacacggctgtgtattattgtgcgcgagatgggacgatctttggagtggtcttgggggactactggggccagggaaccctggtcaccgtctcctca

SEQ ID NO: 1749 - DNA, 363 bp, synthetic construct; identical to SEQ ID NO: 1748
  misc_feature 1..363: note = Description of Artificial Sequence: Synthetic polynucleotide
  source 1..363: mol_type = other DNA

SEQ ID NO: 1750 - DNA, 363 bp, synthetic construct; identical to SEQ ID NO: 1748
  misc_feature 1..363: note = Description of Artificial Sequence: Synthetic polynucleotide
  source 1..363: mol_type = other DNA

SEQ ID NO: 1751 - DNA, 363 bp, synthetic construct
  misc_feature 1..363: note = Description of Artificial Sequence: Synthetic polynucleotide
  source 1..363: mol_type = other DNA
caggtgcagctggtggagtctgggggaggcgtggtccagcctgggaggtccctgagactctcctgtgcagcgtctggattcactttcagtaactttggcatgcactgggtccgccaggctccaggcaaggggctggagtgggtggcagttatatggtatgatgcaagtaatgaaaactatgcagactccgtgaagggccgattcaccatctccagagacaattccaagaatacgctgtatctgcacatgaacagcctgagagtcgcggacacggctgtgtattattgtgcgcgagatgggacgatctttggagtggtcttgggggactactggggccagggaaccctggtcaccgtctcctca

SEQ ID NO: 1752 - DNA, 363 bp, synthetic construct
  misc_feature 1..363: note = Description of Artificial Sequence: Synthetic polynucleotide
  source 1..363: mol_type = other DNA
caggtgcagctggtggagtctgggggaggcgtggtccagcctgggaggtccctgagactctcctgtgcagcgtctggattcactttcagtaactttggcatgcactgggtccgccaggctccaggcaaggggctggagtgggtggcagttatatggtatgatggaagtaatgaaaactatgcagacgccgtgaagggccgattcaccatctccagagacaattccaagaatacgctgtatctgcacatgaacagcctgagagtcgcggacacggctgtgtattattgtgcgcgagatgggacgatctttggagtggtcttgggggactactggggccagggaaccctggtcaccgtctcctca

SEQ ID NO: 1753 - DNA, 363 bp, synthetic construct
  misc_feature 1..363: note = Description of Artificial Sequence: Synthetic polynucleotide
  source 1..363: mol_type = other DNA
caggtgcagctggtggagtctgggggaggcgtggtccagcctgggaggtccctgagactctcctgtgcagcgtctggattcactttcagtaactttggcatgcactgggtccgccaggctccaggcaaggggctggagtgggtggcagttatatggtatgatgcaagtaatgaaaactatgcagacgccgtgaagggccgattcaccatctccagagacaattccaagaatacgctgtatctgcaaatgaacagcctgagagtcgaggacacggctgtgtattattgtgcgcgagataggacgatctttggagtggtcttgggggactactggggccagggaaccctggtcaccgtctcctca

SEQ ID NO: 1754 - DNA, 363 bp, synthetic construct
  misc_feature 1..363: note = Description of Artificial Sequence: Synthetic polynucleotide
  source 1..363: mol_type = other DNA
caggtgcagctggtggagtctgggggaggcgtggtccagcctgggaggtccctgagactctcctgtgcagcgtctggattcactttcagtaactttggcatgcactgggtccgccaggctccaggcaaggggctggagtgggtggcagttatatggtatgatgcaagtaatgaaaactatgcagacgccgtgaagggccgattcaccatctccagagacaattccaagaatacgctgtatctgcaaatgaacagcctgagagtcgaggacacggctgtgtattattgtgcgcgagatgggacgatctttggagtggtcttgggggactactggggccagggaaccctggtcaccgtctcctca

SEQ ID NO: 1755 - DNA, 363 bp, synthetic construct
  misc_feature 1..363: note = Description of Artificial Sequence: Synthetic polynucleotide
  source 1..363: mol_type = other DNA
caggtgcagctggtggagtctgggggaggcgtggtccagcctgggaggtccctgagactctcctgtgcagcgtctggattcactttcagtaactttggcatgcactgggtccgccaggccccaggcaaggggctggagtgggtggcagttatatggtatgatggaagtaatgaaaactatgcagactccgtgaagggccgattcaccatctccagagacaattccaagaacacgctgtatctgcacatgaacagcctgagagccgcggacacggctgtgtattactgtgcgagagatgggacgatctttggagtggtcttgggggactactggggccagggaaccctggtcaccgtctcctca

SEQ ID NO: 1756 - DNA, 363 bp, synthetic construct
  misc_feature 1..363: note = Description of Artificial Sequence: Synthetic polynucleotide
  source 1..363: mol_type = other DNA
caggtgcagctggtggagtctgggggaggcgtggtccagcctgggaggtccctgagactctcctgtgcagcgtctggattcactttcagtaactttggcatgcactgggtccgccaggccccaggcaaggggctggagtgggtggcagttatatggtatgatgcaagtaatgaaaactatgcagacgccgtgaagggccgattcaccatctccagagacaattccaagaacacgctgtatctgcaaatgaacagcctgagagccgcggacacggctgtgtattactgtgcgagagatgggacgatctttggagtggtcttgggggactactggggccagggaaccctggtcaccgtctcctca

SEQ ID NO: 1757 - DNA, 363 bp, synthetic construct
  misc_feature 1..363: note = Description of Artificial Sequence: Synthetic polynucleotide
  source 1..363: mol_type = other DNA
caggtgcagctggtggagtctgggggaggcgtggtccagcctgggaggtccctgagactctcctgtgcagcgtctggattcactttcagtaactttggcatgcactgggtccgccaggccccaggcaaggggctggagtgggtggcagttatatggtatgatgcaagtaatgaaaactatgcagacgccgtgaagggccgattcaccatctccagagacaattccaagaacacgctgtatctgcacatgaacagcctgagagccgcggacacggctgtgtattactgtgcgagagatgggacgatctttggagtggtcttgggggactactggggccagggaaccctggtcaccgtctcctca

SEQ ID NO: 1758 - DNA, 363 bp, synthetic construct; identical to SEQ ID NO: 1756
  misc_feature 1..363: note = Description of Artificial Sequence: Synthetic polynucleotide
  source 1..363: mol_type = other DNA

SEQ ID NO: 1759 - DNA, 363 bp, synthetic construct; identical to SEQ ID NO: 1756
  misc_feature 1..363: note = Description of Artificial Sequence: Synthetic polynucleotide
  source 1..363: mol_type = other DNA

SEQ ID NO: 1760 - DNA, 363 bp, synthetic construct; identical to SEQ ID NO: 1757
  misc_feature 1..363: note = Description of Artificial Sequence: Synthetic polynucleotide
  source 1..363: mol_type = other DNA

SEQ ID NO: 1761 - DNA, 363 bp, synthetic construct; identical to SEQ ID NO: 1757
  misc_feature 1..363: note = Description of Artificial Sequence: Synthetic polynucleotide
  source 1..363: mol_type = other DNA

SEQ ID NO: 1762 - DNA, 363 bp, synthetic construct; identical to SEQ ID NO: 1756
  misc_feature 1..363: note = Description of Artificial Sequence: Synthetic polynucleotide
  source 1..363: mol_type = other DNA

SEQ ID NO: 1763 - DNA, 363 bp, synthetic construct
  misc_feature 1..363: note = Description of Artificial Sequence: Synthetic polynucleotide
  source 1..363: mol_type = other DNA
caggtgcagctggtggagtctgggggaggcgtggtccagcctgggaggtccctgagactctcctgtgcagcgtctggattcactttcagtaactttggcatgcactgggtccgccaggccccaggcaaggggctggagtgggtggcagttatatggtatgatggaagtaatgaaaactatgcagacgccgtgaagggccgattcaccatctccagagacaattccaagaacacgctgtatctgcaaatgaacagcctgagagccgcggacacggctgtgtattactgtgcgagagatgggacgatctttggagtggtcttgggggactactggggccagggaaccctggtcaccgtctcctca

SEQ ID NO: 1764 - DNA, 363 bp, synthetic construct
  misc_feature 1..363: note = Description of Artificial Sequence: Synthetic polynucleotide
  source 1..363: mol_type = other DNA
caggtgcagctggtggagtctgggggaggcgtggtccagcctgggaggtccctgagactctcctgtgcagcgtctggattcactttcagtaactttggcatgcactgggtccgccaggccccaggcaaggggctggagtgggtggcagttatatggtatgatgcaagtaatgaaaactatgcagactccgtgaagggccgattcaccatctccagagacaattccaagaacacgctgtatctgcaaatgaacagcctgagagccgcggacacggctgtgtattactgtgcgagagatgggacgatctttggagtggtcttgggggactactggggccagggaaccctggtcaccgtctcctca

SEQ ID NO: 1765 - DNA, 363 bp, synthetic construct
  misc_feature 1..363: note = Description of Artificial Sequence: Synthetic polynucleotide
  source 1..363: mol_type = other DNA
caggtgcagctggtggagtctgggggaggcgtggtccagcctgggaggtccctgagactctcctgtgcagcgtctggattcactttcagtaactttggcatgcactgggtccgccaggccccaggcaaggggctggagtgggtggcagttatatggtatgatgcaagtaatgaaaactatgcagacgccgtgaagggccgattcaccatctccagagacaattccaagaacacgctgtatctgcaaatgaacagcctgagagccgaggacacggctgtgtattactgtgcgagagataggacgatctttggagtggtcttgggggactactggggccagggaaccctggtcaccgtctcctca

SEQ ID NO: 1766 - DNA, 363 bp, synthetic construct
  misc_feature 1..363: note = Description of Artificial Sequence: Synthetic polynucleotide
  source 1..363: mol_type = other DNA
caggtgcagctggtggagtctgggggaggcgtggtccagcctgggaggtccctgagactctcctgtgcagcgtctggattcactttcagtaactttggcatgcactgggtccgccaggccccaggcaaggggctggagtgggtggcagttatatggtatgatgcaagtaatgaaaactatgcagacgccgtgaagggccgattcaccatctccagagacaattccaagaacacgctgtatctgcaaatgaacagcctgagagccgaggacacggctgtgtattactgtgcgagagatgggacgatctttggagtggtcttgggggactactggggccagggaaccctggtcaccgtctcctca

SEQ ID NO: 1767 - DNA, 360 bp, synthetic construct
  misc_feature 1..360: note = Description of Artificial Sequence: Synthetic polynucleotide
  source 1..360: mol_type = other DNA
caggtgcaactggtggagtctgggggaggcgtggtccagcctgggaggtccctgagactctcctgtgcagcgtctggattcaccttcagtagctatggcatgcactgggtccgccaggctccaggcaaggggctggagtgggtggcagttatatggtatgatgcaagtaataaatactatgcagacgccgtgaagggccgattcaccatctccagggacaattccaagaacacgctgtatctgcaaatgaacagcctgagagccgaggacacggctgtgtattactgtgcgagagataggacgatttttggagtggttcttgactactggggccagggaaccctggtcaccgtctcctca

SEQ ID NO: 1768 - DNA, 360 bp, synthetic construct
  misc_feature 1..360: note = Description of Artificial Sequence: Synthetic polynucleotide
  source 1..360: mol_type = other DNA
caggtgcaactggtggagtctgggggaggcgtggtccagcctgggaggtccctgagactctcctgtgcagcgtctggattcaccttcagtagctatggcatgcactgggtccgccaggctccaggcaaggggctggagtgggtggcagttatatggtatgatgcaagtaataaatactatgcagacgccgtgaagggccgattcaccatctccagcgacaattccaagaacacgctgtatctgcaaatgaacagcctgagagccgaggacacggctgtgtattactgtgcgagagataggacgatttttggagtggttcttgactactggggccagggaaccctggtcaccgtctcctca

SEQ ID NO: 1769 - DNA, 360 bp, synthetic construct; identical to SEQ ID NO: 1767
  misc_feature 1..360: note = Description of Artificial Sequence: Synthetic polynucleotide
  source 1..360: mol_type = other DNA

SEQ ID NO: 1770 - DNA, 360 bp, synthetic construct; identical to SEQ ID NO: 1767
  misc_feature 1..360: note = Description of Artificial Sequence: Synthetic polynucleotide
  source 1..360: mol_type = other DNA

SEQ ID NO: 1771 - DNA, 360 bp, synthetic construct; identical to SEQ ID NO: 1768
  misc_feature 1..360: note = Description of Artificial Sequence: Synthetic polynucleotide
  source 1..360: mol_type = other DNA

SEQ ID NO: 1772 - DNA, 360 bp, synthetic construct; identical to SEQ ID NO: 1768
  misc_feature 1..360: note = Description of Artificial Sequence: Synthetic polynucleotide
  source 1..360: mol_type = other DNA

SEQ ID NO: 1773 - DNA, 360 bp, synthetic construct; identical to SEQ ID NO: 1767
  misc_feature 1..360: note = Description of Artificial Sequence: Synthetic polynucleotide
  source 1..360: mol_type = other DNA

SEQ ID NO: 1774 - DNA, 360 bp, synthetic construct
  misc_feature 1..360: note = Description of Artificial Sequence: Synthetic polynucleotide
  source 1..360: mol_type = other DNA
caggtgcaactggtggagtctgggggaggcgtggtccagcctgggaggtccctgagactctcctgtgcagcgtctggattcaccttcagtagctatggcatgcactgggtccgccaggctccaggcaaggggctggagtgggtggcagttatatggtatgatgcaagtaataaatactatgcagactccgtgaagggccgattcaccatctccagggacaattccaagaacacgctgtatctgcaaatgaacagcctgagagccgaggacacggctgtgtattactgtgcgagagataggacgatttttggagtggttcttgactactggggccagggaaccctggtcaccgtctcctca

SEQ ID NO: 1775 - DNA, 360 bp, synthetic construct
  misc_feature 1..360: note = Description of Artificial Sequence: Synthetic polynucleotide
  source 1..360: mol_type = other DNA
caggtgcaactggtggagtctgggggaggcgtggtccagcctgggaggtccctgagactctcctgtgcagcgtctggattcaccttcagtagctatggcatgcactgggtccgccaggctccaggcaaggggctggagtgggtggcagttatatggtatgatggaagtaataaatactatgcagacgccgtgaagggccgattcaccatctccagggacaattccaagaacacgctgtatctgcaaatgaacagcctgagagccgaggacacggctgtgtattactgtgcgagagataggacgatttttggagtggttcttgactactggggccagggaaccctggtcaccgtctcctca

SEQ ID NO: 1776 - DNA, 363 bp, synthetic construct; identical to SEQ ID NO: 1742
  misc_feature 1..363: note = Description of Artificial Sequence: Synthetic polynucleotide
  source 1..363: mol_type = other DNA

SEQ ID NO: 1777 - DNA, 363 bp, synthetic construct; identical to SEQ ID NO: 1747
  misc_feature 1..363: note = Description of Artificial Sequence: Synthetic polynucleotide
  source 1..363: mol_type = other DNA

SEQ ID NO: 1778 - DNA, 363 bp, synthetic construct; identical to SEQ ID NO: 1742
  misc_feature 1..363: note = Description of Artificial Sequence: Synthetic polynucleotide
  source 1..363: mol_type = other DNA

SEQ ID NO: 1779 - DNA, 363 bp, synthetic construct; identical to SEQ ID NO: 1747
  misc_feature 1..363: note = Description of Artificial Sequence: Synthetic polynucleotide
  source 1..363: mol_type = other DNA

SEQ ID NO: 1780 - DNA, 363 bp, synthetic construct; identical to SEQ ID NO: 1730
  misc_feature 1..363: note = Description of Artificial Sequence: Synthetic polynucleotide
  source 1..363: mol_type = other DNA

SEQ ID NO: 1781 - DNA, 363 bp, synthetic construct; identical to SEQ ID NO: 1743
  misc_feature 1..363: note = Description of Artificial Sequence: Synthetic polynucleotide
  source 1..363: mol_type = other DNA

SEQ ID NO: 1782 - DNA, 363 bp, synthetic construct; identical to SEQ ID NO: 1744
  misc_feature 1..363: note = Description of Artificial Sequence: Synthetic polynucleotide
  source 1..363: mol_type = other DNA

SEQ ID NO: 1783 - DNA, 360 bp, synthetic construct
  misc_feature 1..360: note = Description of Artificial Sequence: Synthetic polynucleotide
  source 1..360: mol_type = other DNA
caggtgcagctggtggagtctgggggaggcgtggtccagcctgggaggtccctgagactctcctgtgcagcgtctggattctccttcagtagctatggcatgcactgggtccgccagcctccaggcaaggggctggagtgggtggcagctatatggtatgatgcaaataataaatactatgcagacgccgtgaagggccgattcaccatctccagagacagttccaagaacacgctgtatctgcaaatgaacagcctgagagccgaggacacggctgtgtattactgtgcgagagatcggacgatttttggagtggtccttgagtactggggccagggaaccctggtcaccgtctcctca

SEQ ID NO: 1784 - DNA, 360 bp, synthetic construct; identical to SEQ ID NO: 1783
  misc_feature 1..360: note = Description of Artificial Sequence: Synthetic polynucleotide
  source 1..360: mol_type = other DNA

SEQ ID NO: 1785 - DNA, 360 bp, synthetic construct
  misc_feature 1..360: note = Description of Artificial Sequence: Synthetic polynucleotide
  source 1..360: mol_type = other DNA
caggtgcagctggtggagtctgggggaggcgtggtccagcctgggaggtccctgagactctcctgtgcagcgtctggattctccttcagtagctatggcatgcactgggtccgccagcctccaggcaaggggctggagtgggtggcagctatatggtatgatgcaaataataaatactatgcagacgccgtgaagggccgattcaccatctccagagacagttccaagaacacgctgtatctgcaaatgaacagcctgagagccgaggacacggctgtgtattactgtgcgagagatcggacgatttttggagtggtccttgagtacctcggccagggaaccctggtcaccgtctcctca

SEQ ID NO: 1786 - DNA, 360 bp, synthetic construct; identical to SEQ ID NO: 1783
  misc_feature 1..360: note = Description of Artificial Sequence: Synthetic polynucleotide
  source 1..360: mol_type = other DNA

SEQ ID NO: 1787 - DNA, 360 bp, synthetic construct; identical to SEQ ID NO: 1785
  misc_feature 1..360: note = Description of Artificial Sequence: Synthetic polynucleotide
  source 1..360: mol_type = other DNA

SEQ ID NO: 1788 - DNA, 360 bp, synthetic construct; identical to SEQ ID NO: 1785
  misc_feature 1..360: note = Description of Artificial Sequence: Synthetic polynucleotide
  source 1..360: mol_type = other DNA

SEQ ID NO: 1789 - DNA, 360 bp, synthetic construct; identical to SEQ ID NO: 1783
  misc_feature 1..360: note = Description of Artificial Sequence: Synthetic polynucleotide
  source 1..360: mol_type = other DNA

SEQ ID NO: 1790 - DNA, 360 bp, synthetic construct
  misc_feature 1..360: note = Description of Artificial Sequence: Synthetic polynucleotide
  source 1..360: mol_type = other DNA
caggtgcagctggtggagtctgggggaggcgtggtccagcctgggaggtccctgagactctcctgtgcagcgtctggattctccttcagtagctatggcatgcactgggtccgccagcctccaggcaaggggctggagtgggtggcagctatatggtatgatggaaataataaatactatgcagacgccgtgaagggccgattcaccatctccagagacagttccaagaacacgctgtatctgcaaatgaacagcctgagagccgaggacacggctgtgtattactgtgcgagagatcggacgatttttggagtggtccttgagtactggggccagggaaccctggtcaccgtctcctca

SEQ ID NO: 1791 - DNA, 360 bp, synthetic construct
  misc_feature 1..360: note = Description of Artificial Sequence: Synthetic polynucleotide
  source 1..360: mol_type = other DNA
caggtgcagctggtggagtctgggggaggcgtggtccagcctgggaggtccctgagactctcctgtgcagcgtctggattctccttcagtagctatggcatgcactgggtccgccagcctccaggcaaggggctggagtgggtggcagctatatggtatgatgcaaataataaatactatgcagactccgtgaagggccgattcaccatctccagagacagttccaagaacacgctgtatctgcaaatgaacagcctgagagccgaggacacggctgtgtattactgtgcgagagatcggacgatttttggagtggtccttgagtactggggccagggaaccctggtcaccgtctcctca

SEQ ID NO: 1792 - DNA, 360 bp, synthetic construct; identical to SEQ ID NO: 1783
  misc_feature 1..360: note = Description of Artificial Sequence: Synthetic polynucleotide
  source 1..360: mol_type = other DNA

SEQ ID NO: 1793 - DNA, 360 bp, synthetic construct; identical to SEQ ID NO: 1785
  misc_feature 1..360: note = Description of Artificial Sequence: Synthetic polynucleotide
  source 1..360: mol_type = other DNA

SEQ ID NO: 1794 - DNA, 360 bp, synthetic construct
  misc_feature 1..360: note = Description of Artificial Sequence: Synthetic polynucleotide
  source 1..360: mol_type = other DNA
caggtgcagctggtggagtctgggggaggcgtggtccagcctgggaggtccctgagactctcctgtgcagcgtctggattcagtttcagtagctatggcatgcactgggtccgccaggctccaggcaagggactggagtgggtggcagttatatggtatgatgcaagtaataaatactatgaagacgccgtgaagggccgattcaccatctccagagacaattccaagaacacgctgtttctgcaagtgaacagcctgagagccgaggacacggctgtgtattactgtgcgagagggattacgatttttggtcatgggtttgaatattggggccagggaaccctggtcaccgtctcctca

SEQ ID NO: 1795 - DNA, 360 bp, synthetic construct
  misc_feature 1..360: note = Description of Artificial Sequence: Synthetic polynucleotide
  source 1..360: mol_type = other DNA
caggtgcagctggtggagtctgggggaggcgtggtccagcctgggaggtccctgagactctcctgtgcagcgtctggattcagtttcagtagctatggcatgcactgggtccgccaggctccaggcaagggactggagtgggtggcagttatatggtatgatggaagtaataaatactatgaagactccgtgaagggccgattcaccatctccagagacaattccaagaacacgctgtttctgcaagtgaacagcctgagagccgaggacacggctgtgtattactgtgcgagagggattacgatttttggtcatgggtttgaatattggggccagggaaccctggtcaccgtctcctca

SEQ ID NO: 1796 - DNA, 360 bp, synthetic construct
  misc_feature 1..360: note = Description of Artificial Sequence: Synthetic polynucleotide
  source 1..360: mol_type = other DNA
caggtgcagctggtggagtctgggggaggcgtggtccagcctgggaggtccctgagactctcctgtgcagcgtctggattcagtttcagtagctatggcatgcactgggtccgccaggctccaggcaagggactggagtgggtggcagttatatggtatgatggaagtaataaatactatgaagacgccgtgaagggccgattcaccatctccagagacaattccaagaacacgctgtttctgcaagtgaacagcctgagagccgaggacacggctgtgtattactgtgcgagagggattacgatttttggtcatgggtttgaatattggggccagggaaccctggtcaccgtctcctca

SEQ ID NO: 1797 - DNA, 360 bp, synthetic construct
  misc_feature 1..360: note = Description of Artificial Sequence: Synthetic polynucleotide
  source 1..360: mol_type = other DNA
caggtgcagctggtggagtctgggggaggcgtggtccagcctgggaggtccctgagactctcctgtgcagcgtctggattcagtttcagtagctatggcatgcactgggtccgccaggctccaggcaagggactggagtgggtggcagttatatggtatgatgcaagtaataaatactatgaagactccgtgaagggccgattcaccatctccagagacaattccaagaacacgctgtttctgcaagtgaacagcctgagagccgaggacacggctgtgtattactgtgcgagagggattacgatttttggtcatgggtttgaatattggggccagggaaccctggtcaccgtctcctca

SEQ ID NO: 1798 - DNA, 360 bp, synthetic construct
  misc_feature 1..360: note = Description of Artificial Sequence: Synthetic polynucleotide
  source 1..360: mol_type = other DNA
caggtgcagctggtggagtctgggggaggcgtggtccagcctgggaggtccctgagactctcctgtgcagcatctggattcaccttcagtaactatggcatgcactgggtccgccaggctccaggcgaggggctggagtgggtggcagctatatggtttgatgcaagtgataaatactatgcagacgccgtgaagggccgattcaccatctccagagacaactccaagaacacgctgtatctgcaaatgaacagcctgagagccgaggacacggctgtgtattactgtgcgagagatcaggcgatttttggagtggtccccgactactggggccagggaaccctggtcaccgtctcctca

SEQ ID NO: 1799 - DNA, 360 bp, synthetic construct
  misc_feature 1..360: note = Description of Artificial Sequence: Synthetic polynucleotide
  source 1..360: mol_type = other DNA
caggtgcagctggtggagtctgggggaggcgtggtccagcctgggaggtccctgagactctcctgtgcagcatctggattcaccttcagtaactatggcatgcactgggtccgccaggctccaggcgaggggctggagtgggtggcagctatatggtttgatgcaagtgataaatactatgcagactccgtgaagggccgattcaccatctccagagacaactccaagaacacgctgtatctgcaaatgaacagcctgagagccgaggacacggctgtgtattactgtgcgagagatcaggcgatttttggagtggtccccgactactggggccagggaaccctggtcaccgtctcctca

SEQ ID NO: 1800 - DNA, 360 bp, synthetic construct
  misc_feature 1..360: note = Description of Artificial Sequence: Synthetic polynucleotide
  source 1..360: mol_type = other DNA
caggtgcagctggtggagtctgggggaggcgtggtccagcctgggaggtccctgagactctcctgtgcagcatctggattcaccttcagtaactatggcatgcactgggtccgccaggctccaggcgaggggctggagtgggtggcagctatatggtttgatggaagtgataaatactatgcagacgccgtgaagggccgattcaccatctccagagacaactccaagaacacgctgtatctgcaaatgaacagcctgagagccgaggacacggctgtgtattactgtgcgagagatcaggcgatttttggagtggtccccgactactggggccagggaaccctggtcaccgtctcctca

SEQ ID NO: 1801 - DNA, 360 bp, synthetic construct; identical to SEQ ID NO: 1798
  misc_feature 1..360: note = Description of Artificial Sequence: Synthetic polynucleotide
  source 1..360: mol_type = other DNA

SEQ ID NO: 1802 - DNA, 360 bp, synthetic construct
  misc_feature 1..360: note = Description of Artificial Sequence: Synthetic polynucleotide
  source 1..360: mol_type = other DNA
caggtgcagctggtggagtctgggggaggcgtggtccagcctgggaggtccctgagactctcctgtgcagcatctggattcaccttcagtaactatggcatgcactgggtccgccaggctccaggcaaggggctggagtgggtggcagctatatggtttgatgcaagtgataaatactatgcagacgccgtgaagggccgattcaccatctccagagacaactccaagaacacgctgtatctgcaaatgaacagcctgagagccgaggacacggctgtgtattactgtgcgagagatcaggcgatttttggagtggtccccgactactggggccagggaaccctggtcaccgtctcctca

SEQ ID NO: 1803 - DNA, 360 bp, synthetic construct; identical to SEQ ID NO: 1802
  misc_feature 1..360: note = Description of Artificial Sequence: Synthetic polynucleotide
  source 1..360: mol_type = other DNA

SEQ ID NO: 1804 - DNA, 360 bp, synthetic construct; identical to SEQ ID NO: 1798
  misc_feature 1..360: note = Description of Artificial Sequence: Synthetic polynucleotide
  source 1..360: mol_type = other DNA

SEQ ID NO: 1805 - DNA, 360 bp, synthetic construct; identical to SEQ ID NO: 1802
  misc_feature 1..360: note = Description of Artificial Sequence: Synthetic polynucleotide
  source 1..360: mol_type = other DNA

SEQ ID NO: 1806 - DNA, 378 bp, synthetic construct
  misc_feature 1..378: note = Description of Artificial Sequence: Synthetic polynucleotide
  source 1..378: mol_type = other DNA
caggtgcagttgcaggagtcgggcccaggactggtgaagccttcagagaccctgtccctcacctgcactgtctctggtgactccatcagcagtggtggttactactggagctggatccgccagcccccagggaagggcctggagtggattgggtacatctattacagtgggagcacctactacaacccgtccctcaagagtcgagttaccatatcagtagacacgtctaagaaccagttctccctgaagctgagctctgtgactgccgcggacacggccgtgtattactgtgcgagagatcgtattacgatttttggagtggttatggggggcggtatggacgtctggggccaagggaccacggtcaccgtctcctca

SEQ ID NO: 1807 - DNA, 378 bp, synthetic construct; identical to SEQ ID NO: 1806
  misc_feature 1..378: note = Description of Artificial Sequence: Synthetic polynucleotide
  source 1..378: mol_type = other DNA

SEQ ID NO: 1808 - DNA, 378 bp, synthetic construct
  misc_feature 1..378: note = Description of Artificial Sequence: Synthetic polynucleotide
  source 1..378: mol_type = other DNA
caggtgcagttgcaggagtcgggcccaggactggtgaagccttcacagaccctgtccctcacctgcactgtctctggtgactccatcagcagtggtggttactactggagctggatccgccagcccccagggaagggcctggagtggattgggtacatctattacagtgggagcacctactacaacccgtccctcaagagtcgagttaccatatcagtagacacgtctaagaaccagttctccctgaagctgagctctgtgactgccgcggacacggccgtgtattactgtgcgagagatcgtattacgatttttggagtggttatggggggcggtatggacgtctggggccaagggaccacggtcaccgtctcctca

SEQ ID NO: 1809 - DNA, 378 bp, synthetic construct
  misc_feature 1..378: note = Description of Artificial Sequence: Synthetic polynucleotide
  source 1..378: mol_type = other DNA
caggtgcagttgcaggagtcgggcccaggactggtgaagccttcagagaccctgtccctcacctgcactgtctctggtgactccatcagcagtggtggttactactggagctggatccgccagcacccagggaagggcctggagtggattgggtacatctattacagtgggagcacctactacaacccgtccctcaagagtcgagttaccatatcagtagacacgtctaagaaccagttctccctgaagctgagctctgtgactgccgcggacacggccgtgtattactgtgcgagagatcgtattacgatttttggagtggttatggggggcggtatggacgtctggggccaagggaccacggtcaccgtctcctca

SEQ ID NO: 1810 - DNA, 378 bp, synthetic construct; identical to SEQ ID NO: 1736
  misc_feature 1..378: note = Description of Artificial Sequence: Synthetic polynucleotide
  source 1..378: mol_type = other DNA

SEQ ID NO: 1811 - DNA, 378 bp, synthetic construct; identical to SEQ ID NO: 1809
  misc_feature 1..378: note = Description of Artificial Sequence: Synthetic polynucleotide
  source 1..378: mol_type = other DNA

SEQ ID NO: 1812 - DNA, 378 bp, synthetic construct; identical to SEQ ID NO: 1808
  misc_feature 1..378: note = Description of Artificial Sequence: Synthetic polynucleotide
  source 1..378: mol_type = other DNA

SEQ ID NO: 1813 - DNA, 369 bp, synthetic construct
  misc_feature 1..369: note = Description of Artificial Sequence: Synthetic polynucleotide
  source 1..369: mol_type = other DNA
caggtgcagctggtgcagtctggggctgaggtgaagaagcctggggcctcagtgaaggtctcctgcaaggcttctggatacaccttcaccggctactatatccactgggtgcgacaggcccctggacaagggcttgagtggatggggtggatcaaccctgaaagtggtggcacagactattcacagaggtttcagggcagggtcaccatgaccagggacacgtccatcagcacagcctacatggaactgaacaggctgagatctgacgacacggccgtgtattactgtgcgagagaggccacgatttttggaatggttattgtaccgtttgactactggggccagggaaccctggtcaccgtctcctca

SEQ ID NO: 1814 - DNA, 369 bp, synthetic construct
  misc_feature 1..369: note = Description of Artificial Sequence: Synthetic polynucleotide
  source 1..369: mol_type = other DNA
caggtgccgctggtgcagtctggggctgaggtgaagaagcctggggcctcagtgaaggtctcctgcaaggcttctggatacaccttcaccggctactatatccactgggtgcgacaggcccctggacaagggcttgagtggatggggtggatcaaccctgaaagtggtggcacagactattcacagaggtttcagggcaggttcaccatgaccagggacacgtccatcagcacagcctacatggaactgaacaggctgagatctgacgacacggccgtgtattactgtgcgagagaggccacgatttttggaatggttattgtaccgtttgactactggggccagggaaccctggtcaccgtctcctca

SEQ ID NO: 1815 - DNA, 369 bp, synthetic construct
  misc_feature 1..369: note = Description of Artificial Sequence: Synthetic polynucleotide
  source 1..369: mol_type = other DNA
caggtgcagctggtgcagtctggggctgaggtgaagaagcctggggcctcagtgaaggtctcctgcaaggcttctggatacaccttcaccggctactatatccactgggtgcgacaggcccctggacaagggcttgagtggatggggtggatcaaccctgacgctggtggcacagactattcacagaggtttcagggcagggtcaccatgaccagggacacgtccatcagcacagcctacatggaactgaacaggctgagatctgacgacacggccgtgtattactgtgcgagagaggccacgatttttggaatggttattgtaccgtttgactactggggccagggaaccctggtcaccgtctcctca

SEQ ID NO: 1816 - DNA, 369 bp, synthetic construct
  misc_feature 1..369: note = Description of Artificial Sequence: Synthetic polynucleotide
  source 1..369: mol_type = other DNA
caggtgccgctggtgcagtctggggctgaggtgaagaagcctggggcctcagtgaaggtctcctgcaaggcttctggatacaccttcaccggctactatatccactgggtgcgacaggcccctggacaagggcttgagtggatggggtggatcaaccctgacgctggtggcacagactattcacagaggtttcagggcaggttcaccatgaccagggacacgtccatcagcacagcctacatggaactgaacaggctgagatctgacgacacggccgtgtattactgtgcgagagaggccacgatttttggaatggttattgtaccgtttgactactggggccagggaaccctggtcaccgtctcctca

SEQ ID NO: 1817 - DNA, 369 bp, synthetic construct
  misc_feature 1..369: note = Description of Artificial Sequence: Synthetic polynucleotide
  source 1..369: mol_type = other DNA
caggtgcagctggtgcagtctggggctgaggtgaagaagcctggggcctcagtgaaggtctcctgcaaggcttctggatacaccttcaccggctactatatccactgggtgcgacaggcccctggacaagggcttgagtggatggggtggatcaaccctgacagtggtggcacagactattcacagaggtttcagggcagggtcaccatgaccagggacacgtccatcagcacagcctacatggaactgaacaggctgagatctgacgacacggccgtgtattactgtgcgagagaggccacgatttttggaatggttattgtaccgtttgactactggggccagggaaccctggtcaccgtctcctca

SEQ ID NO: 1818 - DNA, 369 bp, synthetic construct
  misc_feature 1..369: note = Description of Artificial Sequence: Synthetic polynucleotide
  source 1..369: mol_type = other DNA
caggtgcagctggtgcagtctggggctgaggtgaagaagcctggggcctcagtgaaggtctcctgcaaggcttctggatacaccttcaccggctactatatccactgggtgcgacaggcccctggacaagggcttgagtggatggggtggatcaaccctgacagtggtggcacagactattcacagaggtttcagggcaggttcaccatgaccagggacacgtccatcagcacagcctacatggaactgaacaggctgagatctgacgacacggccgtgtattactgtgcgagagaggccacgatttttggaatggttattgtaccgtttgactactggggccagggaaccctggtcaccgtctcctca

SEQ ID NO: 1819 - DNA, 369 bp, synthetic construct
  misc_feature 1..369: note = Description of Artificial Sequence: Synthetic polynucleotide
  source 1..369: mol_type = other DNA
caggtgccgctggtgcagtctggggctgaggtgaagaagcctggggcctcagtgaaggtctcctgcaaggcttctggatacaccttcaccggctactatatccactgggtgcgacaggcccctggacaagggcttgagtggatggggtggatcaaccctgacagtggtggcacagactattcacagaggtttcagggcagggtcaccatgaccagggacacgtccatcagcacagcctacatggaactgaacaggctgagatctgacgacacggccgtgtattactgtgcgagagaggccacgatttttggaatggttattgtaccgtttgactactggggccagggaaccctggtcaccgtctcctca

SEQ ID NO: 1820 - DNA, 369 bp, synthetic construct
  misc_feature 1..369: note = Description of Artificial Sequence: Synthetic polynucleotide
  source 1..369: mol_type = other DNA
caggtgcagctggtgcagtctggggctgaggtgaagaagcctggggcctcagtgaaggtctcctgcaaggcttctggatacaccttcaccggctactatatccactgggtgcgacaggcccctggacaagggcttgagtggatggggtggatcaaccctgacgctggtggcacagactattcacagaggtttcagggcaggttcaccatgaccagggacacgtccatcagcacagcctacatggaactgaacaggctgagatctgacgacacggccgtgtattactgtgcgagagaggccacgatttttggaatggttattgtaccgtttgactactggggccagggaaccctggtcaccgtctcctca

SEQ ID NO: 1821 - DNA, 369 bp, synthetic construct
  misc_feature 1..369: note = Description of Artificial Sequence: Synthetic polynucleotide
  source 1..369: mol_type = other DNA
caggtgccgctggtgcagtctggggctgaggtgaagaagcctggggcctcagtgaaggtctcctgcaaggcttctggatacaccttcaccggctactatatccactgggtgcgacaggcccctggacaagggcttgagtggatggggtggatcaaccctgacgctggtggcacagactattcacagaggtttcagggcagggtcaccatgaccagggacacgtccatcagcacagcctacatggaactgaacaggctgagatctgacgacacggccgtgtattactgtgcgagagaggccacgatttttggaatggttattgtaccgtttgactactggggccagggaaccctggtcaccgtctcctca

SEQ ID NO: 1822 - DNA, 369 bp, synthetic construct
  misc_feature 1..369: note = Description of Artificial Sequence: Synthetic polynucleotide
  source 1..369: mol_type = other DNA
caggtgcagctggtgcagtctggggctgaggtgaagaagcctggggcctcagtgaaggtctcctgcaaggcttctggatacaccttcaccggctactatatccactgggtgcgacaggcccctggacaagggcttgagtggatggggtggatcaaccctgacgctggtggcacagactattcacagaggtttcagggcagggtcaccatgaccagggacacgtccatcagcacagcctacatggaactgaacagcctgagatctgacgacacggccgtgtattactgtgcgagagaggccacgatttttggaatggttattgtaccgtttgactactggggccagggaaccctggtcaccgtctcctca

SEQ ID NO: 1823 - DNA, 369 bp, synthetic construct
  misc_feature 1..369: note = Description of Artificial Sequence: Synthetic polynucleotide
  source 1..369: mol_type = other DNA
caggtgcagctggtgcagtctggggctgaggtgaagaagcctggggcctcagtgaaggtctcctgcaaggcttctggatacaccttcaccggctactatatccactgggtgcgacaggcccctggacaagggcttgagtggatggggtggatcaaccctgaaagtggtggcacagactattcacagaggtttcagggcagggtcaccatgaccagggacacgtccatcagcacagcctacatggaactgaacagcctgagatctgacgacacggccgtgtattactgtgcgagagaggccacgatttttggaatggttattgtaccgtttgactactggggccagggaaccctggtcaccgtctcctca

SEQ ID NO: 1824 - DNA, 369 bp, synthetic construct
  misc_feature 1..369: note = Description of Artificial Sequence: Synthetic polynucleotide
  source 1..369: mol_type = other DNA
caggtgccgctggtacagtctggggctgaggtgaagaagcctggggcctcagtgaaggtctcctgcaaggcttctggatacaccttcaccggctactatatacactgggtgcgtcaggcccctggacaagggcttgtgtggatggggtggatcagccctaacagtggtgaaacaagctatgcacagaagtttcaggacagggtcaccatgaccagggacacgtccatcagcacagcctatatggagctgagcagactgagatctgacgacacggccgtgtatttctgtgcgagagaggccacgatttttggaatgcttattgtaccatttgactactggggccagggaaccctggtcaccgtctcctca

SEQ ID NO: 1825 - DNA, 369 bp, synthetic construct
  misc_feature 1..369: note = Description of Artificial Sequence: Synthetic polynucleotide
  source 1..369: mol_type = other DNA
caggtgccgctggtacagtctggggctgaggtgaagaagcctggggcctcagtgaaggtctcctgcaaggcttctggatacaccttcaccggctactatatacactgggtgcgtcaggcccctggacaagggcttgtgtggatggggtggatcagccctaacagtggtgacacaagctatgcacagaagtttcaggacagggtcaccatgaccagggacacgtccatcagcacagcctatatggagctgagcagactgagatctgacgacacggccgtgtatttctgtgcgagagaggccacgatttttggaatgcttattgtaccatttgactactggggccagggaaccctggtcaccgtctcctca

SEQ ID NO: 1826 - DNA, 369 bp, synthetic construct; identical to SEQ ID NO: 1824
  misc_feature 1..369: note = Description of Artificial Sequence: Synthetic polynucleotide
  source 1..369: mol_type = other DNA

SEQ ID NO: 1827 - DNA, 369 bp, synthetic construct
  misc_feature 1..369: note = Description of Artificial Sequence: Synthetic polynucleotide
  source 1..369: mol_type = other DNA
caggtgccgctggtacagtctggggctgaggtgaagaagcctggggcctcagtgaaggtctcctgcaaggcttctggatacaccttcaccggctactatatacactgggtgcgtcaggcccctggacaagggcttgtgtggatggggtggatcagccctaacagtggtgaaacaagctatgcacagaagtttcaggacagggtcaccatgaccagggacacgtccatcagcacagcctatatggagctgagcagactgagatctgacgacacggccgtgtatttctgtacgagagaggccacgatttttggaatgcttattgtaccatttgactactggggccagggaaccctggtcaccgtctcctca

SEQ ID NO: 1828 - DNA, 369 bp, synthetic construct; identical to SEQ ID NO: 1734
  misc_feature 1..369: note = Description of Artificial Sequence: Synthetic polynucleotide
  source 1..369: mol_type = other DNA

SEQ ID NO: 1829 - DNA, 369 bp, synthetic construct; identical to SEQ ID NO: 1827
  misc_feature 1..369: note = Description of Artificial Sequence: Synthetic polynucleotide
  source 1..369: mol_type = other DNA

SEQ ID NO: 1830 - DNA, 369 bp, synthetic construct; identical to SEQ ID NO: 1825
  misc_feature 1..369: note = Description of Artificial Sequence: Synthetic polynucleotide
  source 1..369: mol_type = other DNA

SEQ ID NO: 1831 - DNA, 369 bp, synthetic construct
  misc_feature 1..369: note = Description of Artificial Sequence: Synthetic polynucleotide
  source 1..369: mol_type = other DNA
caggtgcagctggtacagtctggggctgaggtgaagaagcctggggcctcagtgaaggtctcctgcaaggcttctggatacaccttcaccggctactatatacactgggtgcgtcaggcccctggacaagggcttgagtggatggggtggatcagccctaacagtggtgaaacaagctatgcacagaagtttcaggacagggtcaccatgaccagggacacgtccatcagcacagcctatatggagctgagcagcctgagatctgacgacacggccgtgtatttctgtgcgagagaggccacgatttttggaatgcttattgtaccatttgactactggggccagggaaccctggtcaccgtctcctca

SEQ ID NO: 1832 - DNA, 369 bp, synthetic construct
  misc_feature 1..369: note = Description of Artificial Sequence: Synthetic polynucleotide
  source 1..369: mol_type = other DNA
caggtgcagctggtacagtctggggctgaggtgaagaagcctggggcctcagtgaaggtctcctgcaaggcttctggatacaccttcaccggctactatatacactgggtgcgtcaggcccctggacaagggcttgagtggatggggtggatcagccctaacagtggtgaaacaagctatgcacagaagtttcaggacagggtcaccatgaccagggacacgtccatcagcacagcctatatggagctgagcagactgagatctgacgacacggccgtgtatttctgtgcgagagaggccacgatttttggaatgcttattgtaccatttgactactggggccagggaaccctggtcaccgtctcctca

SEQ ID NO: 1833 - DNA, 369 bp, synthetic construct
  misc_feature 1..369: note = Description of Artificial Sequence: Synthetic polynucleotide
  source 1..369: mol_type = other DNA
caggtgccgctggtgcagtctggggctgaggtgaagaagcctggggcctcagtgaaggtctcctgcaaggcttctggatacaccttcaccggctactatatccactgggtgcgacaggcccctggacaaggacttgagtggatggggtggatcaaccctgaaagtggtggcacagactattcacagaggtttcagggcagggtcaccatgaccagggacacgtccatcagcacagcctacatggaactgagcaggctgagatctgacgacacggccgtgtattactgtgcgagagaggccacgatttttggaatggttattgtaccgtttgactactggggccagggaaccctggtcaccgtctcctca

SEQ ID NO: 1834 - DNA, 369 bp, synthetic construct
  misc_feature 1..369: note = Description of Artificial Sequence: Synthetic polynucleotide
  source 1..369: mol_type = other DNA
caggtgccgctggtgcagtctggggctgaggtgaagaagcctggggcctcagtgaaggtctcctgcaaggcttctggatacaccttcaccggctactatatccactgggtgcgacaggcccctggacaaggacttgagtggatggggtggatcaaccctgaaagtggtggcacagactattcacagaggtttcagggcaggttcaccatgaccagggacacgtccatcagcacagcctacatggaactgagcaggctgagatctgacgacacggccgtgtattactgtgcgagagaggccacgatttttggaatggttattgtaccgtttgactactggggccagggaaccctggtcaccgtctcctca

SEQ ID NO: 1835 - DNA, 369 bp, synthetic construct
  misc_feature 1..369: note = Description of Artificial Sequence: Synthetic polynucleotide
  source 1..369: mol_type = other DNA
caggtgccgctggtgcagtctggggctgaggtgaagaagcctggggcctcagtgaaggtctcctgcaaggcttctggatacaccttcaccggctactatatccactgggtgcgacaggcccctggacaaggacttgagtggatggggtggatcaaccctgacagtggtggcacagactattcacagaggtttcagggcagggtcaccatgaccagggacacgtccatcagcacagcctacatggaactgagcaggctgagatctgacgacacggccgtgtattactgtgcgagagaggccacgatttttggaatggttattgtaccgtttgactactggggccagggaaccctggtcaccgtctcctca

SEQ ID NO: 1836 - DNA, 369 bp, synthetic construct
  misc_feature 1..369: note = Description of Artificial Sequence: Synthetic polynucleotide
  source 1..369: mol_type = other DNA
caggtgcagctggtgcagtctggggctgaggtgaagaagcctggggcctcagtgaaggtctcctgcaaggcttctggatacaccttcaccggctactatatccactgggtgcgacaggcccctggacaaggacttgagtggatggggtggatcaaccctgaaagtggtggcacagactattcacagaggtttcagggcagggtcaccatgaccagggacacgtccatcagcacagcctacatggaactgagcagcctgagatctgacgacacggccgtgtattactgtgcgagagaggccacgatttttggaatggttattgtaccgtttgactactggggccagggaaccctggtcaccgtctcctca

SEQ ID NO: 1837 - DNA, 369 bp, synthetic construct; identical to SEQ ID NO: 1833
  misc_feature 1..369: note = Description of Artificial Sequence: Synthetic polynucleotide
  source 1..369: mol_type = other DNA

SEQ ID NO: 1838 - DNA, 369 bp, synthetic construct
  misc_feature 1..369: note = Description of Artificial Sequence: Synthetic polynucleotide
  source 1..369: mol_type = other DNA
caggtgccgctggtgcagtctggggctgaggtgaagaagcctggggcctcagtgaaggtctcctgcaaggcttctggatacaccttcaccggctactatatacactgggtgcgtcaggcccctggacaagggcttgagtggatggggtggataagccctaaccaaggtgaaacaaactatgcacagaagtttcaggacagggtcaccatgaccagggacacgtccatcagcacagcctatatggagctgagcaggctgagatctgacgacacggccgtgtattactgtgcgagagaggccacgatttttggaatgcttattgtaccatttgactactggggccagggaaccctggtcaccgtctcctca

SEQ ID NO: 1839 - DNA, 369 bp, synthetic construct
  misc_feature 1..369: note = Description of Artificial Sequence: Synthetic polynucleotide
  source 1..369: mol_type = other DNA
caggtgccgctggtgcagtctggggctgaggtgaagaagcctggggcctcagtgaaggtctcctgcaaggcttctggatacaccttcaccggctactatatacactgggtgcgtcaggcccctggacaagggcttgagtggatggggtggataagccctaaccaaggtgacacaaactatgcacagaagtttcaggacagggtcaccatgaccagggacacgtccatcagcacagcctatatggagctgagcaggctgagatctgacgacacggccgtgtattactgtgcgagagaggccacgatttttggaatgcttattgtaccatttgactactggggccagggaaccctggtcaccgtctcctca

SEQ ID NO: 1840 - DNA, 369 bp, synthetic construct
  misc_feature 1..369: note = Description of Artificial Sequence: Synthetic polynucleotide
  source 1..369: mol_type = other DNA
caggtgccgctggtgcagtctggggctgaggtgaagaagcctggggcctcagtgaaggtctcctgcaaggcttctggatacaccttcaccggctactatatacactgggtgcgtcaggcccctggacaagggcttgagtggatggggtggataagccctaaccaaggtgaaacaaactatgcacagaagtttcaggacagggtcaccatgaccagggacacgtccatcagcacagcctatatggagctgagcaggctgagatctgacgacacggccgtgtattactgtacgagagaggccacgatttttggaatgcttattgtaccatttgactactggggccagggaaccctggtcaccgtctcctca

SEQ ID NO: 1841 - DNA, 369 bp, synthetic construct
  misc_feature 1..369: note = Description of Artificial Sequence: Synthetic polynucleotide
  source 1..369: mol_type = other DNA
caggtgccgctggtgcagtctggggctgaggtgaagaagcctggggcctcagtgaaggtctcctgcaaggcttctggatacaccttcaccggctactatatacactgggtgcgtcaggcccctggacaagggcttgagtggatggggtggataagccctaacaatggtgaaacaaactatgcacagaagtttcaggacagggtcaccatgaccagggacacgtccatcagcacagcctatatggagctgagcaggctgagatctgacgacacggccgtgtattactgtgcgagagaggccacgatttttggaatgcttattgtaccatttgactactggggccagggaaccctggtcaccgtctcctca

SEQ ID NO: 1842 - DNA, 369 bp, synthetic construct
  misc_feature 1..369: note = Description of Artificial Sequence: Synthetic polynucleotide
  source 1..369: mol_type = other DNA
caggtgccgctggtgcagtctggggctgaggtgaagaagcctggggcctcagtgaaggtctcctgcaaggcttctggatacaccttcaccggctactatatacactgggtgcgtcaggcccctggacaagggcttgagtggatggggtggataagccctaacaatggtgacacaaactatgcacagaagtttcaggacagggtcaccatgaccagggacacgtccatcagcacagcctatatggagctgagcaggctgagatctgacgacacggccgtgtattactgtgcgagagaggccacgatttttggaatgcttattgtaccatttgactactggggccagggaaccctggtcaccgtctcctca

SEQ ID NO: 1843 - DNA, 369 bp, synthetic construct
  misc_feature 1..369: note = Description of Artificial Sequence: Synthetic polynucleotide
  source 1..369: mol_type = other DNA
caggtgccgctggtgcagtctggggctgaggtgaagaagcctggggcctcagtgaaggtctcctgcaaggcttctggatacaccttcaccggctactatatacactgggtgcgtcaggcccctggacaagggcttgagtggatggggtggataagccctaaccaaggtgacacaaactatgcacagaagtttcaggacagggtcaccatgaccagggacacgtccatcagcacagcctatatggagctgagcaggctgagatctgacgacacggccgtgtattactgtacgagagaggccacgatttttggaatgcttattgtaccatttgactactggggccagggaaccctggtcaccgtctcctca

SEQ ID NO: 1844 - DNA, 369 bp, synthetic construct
  misc_feature 1..369: note = Description of Artificial Sequence: Synthetic polynucleotide
  source 1..369: mol_type = other DNA
caggtgccgctggtgcagtctggggctgaggtgaagaagcctggggcctcagtgaaggtctcctgcaaggcttctggatacaccttcaccggctactatatacactgggtgcgtcaggcccctggacaagggcttgagtggatggggtggataagccctaacaatggtgaaacaaactatgcacagaagtttcaggacagggtcaccatgaccagggacacgtccatcagcacagcctatatggagctgagcaggctgagatctgacgacacggccgtgtattactgtacgagagaggccacgatttttggaatgcttattgtaccatttgactactggggccagggaaccctggtcaccgtctcctca

SEQ ID NO: 1845 - DNA, 369 bp, synthetic construct; identical to SEQ ID NO: 1838
  misc_feature 1..369: note = Description of Artificial Sequence: Synthetic polynucleotide
  source 1..369: mol_type = other DNA

SEQ ID NO: 1846 - DNA, 369 bp, synthetic construct; identical to SEQ ID NO: 1842
  misc_feature 1..369: note = Description of Artificial Sequence: Synthetic polynucleotide
  source 1..369: mol_type = other DNA

SEQ ID NO: 1847 - DNA, 369 bp, synthetic construct; identical to SEQ ID NO: 1839
  misc_feature 1..369: note = Description of Artificial Sequence: Synthetic polynucleotide
  source 1..369: mol_type = other DNA

SEQ ID NO: 1848 - DNA, 369 bp, synthetic construct; identical to SEQ ID NO: 1841
  misc_feature 1..369: note = Description of Artificial Sequence: Synthetic polynucleotide
  source 1..369: mol_type = other DNA

SEQ ID NO: 1849 - DNA, 369 bp, synthetic construct
  misc_feature 1..369: note = Description of Artificial Sequence: Synthetic polynucleotide
  source 1..369: mol_type = other DNA
caggtgcagctggtgcagtctggggctgaggtgaagaagcctggggcctcagtgaaggtctcctgcaaggcttctggatacaccttcaccggctactatatacactgggtgcgtcaggcccctggacaagggcttgagtggatggggtggataagccctaaccaaggtgaaacaaactatgcacagaagtttcaggacagggtcaccatgaccagggacacgtccatcagcacagcctatatggagctgagcagcctgagatctgacgacacggccgtgtattactgtgcgagagaggccacgatttttggaatgcttattgtaccatttgactactggggccagggaaccctggtcaccgtctcctca

SEQ ID NO: 1850 - DNA, 369 bp, synthetic construct; identical to SEQ ID NO: 1849
  misc_feature 1..369: note = Description of Artificial Sequence: Synthetic polynucleotide
  source 1..369: mol_type = other DNA

SEQ ID NO: 1851 - DNA, 384 bp, synthetic construct; identical to SEQ ID NO: 1728
  misc_feature 1..384: note = Description of Artificial Sequence: Synthetic polynucleotide
  source 1..384: mol_type = other DNA

SEQ ID NO: 1852 - DNA, 384 bp, synthetic construct; identical to SEQ ID NO: 1728
  misc_feature 1..384: note = Description of Artificial Sequence: Synthetic polynucleotide
  source 1..384: mol_type = other DNA

SEQ ID NO: 1853 - DNA, 384 bp, synthetic construct; identical to SEQ ID NO: 1728
  misc_feature 1..384: note = Description of Artificial Sequence: Synthetic polynucleotide
  source 1..384: mol_type = other DNA

SEQ ID NO: 1854 - DNA, 384 bp, synthetic construct; identical to SEQ ID NO: 1728
  misc_feature 1..384: note = Description of Artificial Sequence: Synthetic polynucleotide
  source 1..384: mol_type = other DNA

SEQ ID NO: 1855 - DNA, 384 bp, synthetic construct; identical to SEQ ID NO: 1728
  misc_feature 1..384: note = Description of Artificial Sequence: Synthetic polynucleotide
  source 1..384: mol_type = other DNA

SEQ ID NO: 1856 - DNA, 384 bp, synthetic construct; identical to SEQ ID NO: 1728
  misc_feature 1..384: note = Description of Artificial Sequence: Synthetic polynucleotide
  source 1..384: mol_type = other DNA

SEQ ID NO: 1857 - DNA, 384 bp, synthetic construct; identical to SEQ ID NO: 1728
  misc_feature 1..384: note = Description of Artificial Sequence: Synthetic polynucleotide
  source 1..384: mol_type = other DNA

SEQ ID NO: 1858 - DNA, 384 bp, synthetic construct; identical to SEQ ID NO: 1728
  misc_feature 1..384: note = Description of Artificial Sequence: Synthetic polynucleotide
  source 1..384: mol_type = other DNA

SEQ ID NO: 1859 - DNA, 384 bp, synthetic construct; identical to SEQ ID NO: 1728
  misc_feature 1..384: note = Description of Artificial Sequence: Synthetic polynucleotide
  source 1..384: mol_type = other DNA

SEQ ID NO: 1860 - DNA, 384 bp, synthetic construct; identical to SEQ ID NO: 1728
  misc_feature 1..384: note = Description of Artificial Sequence: Synthetic polynucleotide
  source 1..384: mol_type = other DNA

SEQ ID NO: 1861 - DNA, 384 bp, synthetic construct; identical to SEQ ID NO: 1728
  misc_feature 1..384: note = Description of Artificial Sequence: Synthetic polynucleotide
  source 1..384: mol_type = other DNA

SEQ ID NO: 1862 - DNA, 384 bp, synthetic construct; identical to SEQ ID NO: 1728
  misc_feature 1..384: note = Description of Artificial Sequence: Synthetic polynucleotide
  source 1..384: mol_type = other DNA

SEQ ID NO: 1863 - DNA, 384 bp, synthetic construct
  misc_feature 1..384: note = Description of Artificial Sequence: Synthetic polynucleotide
  source 1..384: mol_type = other DNA
cagatgcaggtggtgcagtctggggctgaggtgaagaagcctggggcctcagtgaaggtctcctgcaaggcttccggatacaccttcaccggctactatatgcattgggtgcgacaggcccctggacaagggcttgagtggatgggatggatcaaccctaacagtggtggcacaaactatgcacagaagtttcagggcagggtcaccatgaccagggacacgtccatcagtacagcctacatggagctgagcagcctgaggtctgacgacacggccgtgtattactgtgcgagagggggggattacgttttcgggacttatcggcctcactactactacggtatggacgtctggggccaagggaccacggtcaccgtctcctca

SEQ ID NO: 1864 - DNA, 384 bp, synthetic construct
  misc_feature 1..384: note = Description of Artificial Sequence: Synthetic polynucleotide
  source 1..384: mol_type = other DNA
cagatgcaggtggtgcagtctggggctgaggtgaagaagcctggggcctcagtgaaggtctcctgcaaggcttccggatacaccttcaccggctactatatgcattgggtgcgacaggcccctggacaagggcttgagtggatgggatggatcaaccctaacagtggtggcacaaactatgcacagaagtttcagggcagggtcaccatgaccagggacacgtccatcagtacagcctacatggagctgagcaggctgaggtctgacgacacggccgtgtattactgtgcgagagggggggattacgttttcgggacttatcggcctcactactactacggtatggacgtctggggccaagggaccacggtcaccgtctcctca

SEQ ID NO: 1865 - DNA, 363 bp, synthetic construct; identical to SEQ ID NO: 1765
  misc_feature 1..363: note = Description of Artificial Sequence: Synthetic polynucleotide
  source 1..363: mol_type = other DNA

SEQ ID NO: 1866 - DNA, 363 bp, synthetic construct; identical to SEQ ID NO: 1747
  misc_feature 1..363: note = Description of Artificial Sequence: Synthetic polynucleotide
  source 1..363: mol_type = other DNA

SEQ ID NO: 1867 - DNA, 384 bp, synthetic construct; identical to SEQ ID NO: 1728
  misc_feature 1..384: note = Description of Artificial Sequence: Synthetic polynucleotide
  source 1..384: mol_type = other DNA

SEQ ID NO: 1868 - DNA, 363 bp, synthetic construct
  misc_feature 1..363: note = Description of Artificial Sequence: Synthetic polynucleotide
  source 1..363: mol_type = other DNA
caggtgcagttggtggagtctgggggaggcgtggtccagcctgggaggtccctgagactctcctgtacagcgtctggattcaccttcagtagctatggcatacactgggtccgccaggctccaggcaaggggctggagtgggtggcagttatatggtatgatggaagtaataagttccatgcagactccgtgaagggccgattcaccatctccagagacaattccaagaacacgctgtatctgcaaatgaacagcctgagagccgaggactcggctatgtacttctgtgcgagaggaaaagtggctggtatgcctgaagcttttgaaatctggggccaagggacaaaggtcaccgtctcttca

SEQ ID NO: 1869 - DNA, 387 bp, synthetic construct
  misc_feature 1..387: note = Description of Artificial Sequence: Synthetic polynucleotide
  source 1..387: mol_type = other DNA
caaatgcagctggtgcagtctggggctgaggtgaagaagcctggggcctcagtgaaggtctcctgcaaggcttctggatacaccttcaccagttatgatatcaactgggtgcgacaggccactggacaagggcttgagtggatgggatggatgaaccctaacagtggtaacacaggctatgcacagaagttccagggcagagtcaccatgaccagggacacctccataagcacagcctacatggagctgagcagcctgagatctcaggacacggccgtgtattactgtgcgagagggggtgattacgtttgggggagttatcgtccctactactactactacggtatggacgtctggggccaagggaccacggtcaccgtctcctca

SEQ ID NO: 1870 - DNA, 363 bp, synthetic construct
  misc_feature 1..363: note = Description of Artificial Sequence: Synthetic polynucleotide
  source 1..363: mol_type = other DNA
caggtgcagttggtggagtctgggggaggcgtggtccagcctgggaggtccctgagactctcctgtgcagcgtctggattcaccttcagtagctatggcatacactgggtccgccaggctccaggcaaggggctggagtgggtggcagttatatggtatgatgcaagtaataagttccatgcagacgccgtgaagggccgattcaccatctccagagacaattccaagaacacgctgtatctgcaaatgaacagcctgagagccgaggactcggctatgtacttctgtgcgagaggaaaagtggctggtatgcctgaagcttttgaaatctggggccaagggacaaaggtcaccgtctcttca

SEQ ID NO: 1871 - DNA, 363 bp, synthetic construct
  misc_feature 1..363: note = Description of Artificial Sequence: Synthetic polynucleotide
  source 1..363: mol_type = other DNA
caggtgcagttggtggagtctgggggaggcgtggtccagcctgggaggtccctgagactctcctgtacagcgtctggattcaccttcagtagctatggcatacactgggtccgccaggctccaggcaaggggctggagtgggtggcagttatatggtatgatgcaagtaataagttccatgcagacgccgtgaagggccgattcaccatctccagagacaattccaagaacacgctgtatctgcaaatgaacagcctgagagccgaggactcggctatgtacttctgtgcgagaggaaaagtggctggtatgcctgaagcttttgaaatctggggccaagggacaaaggtcaccgtctcttca

SEQ ID NO: 1872 - DNA, 363 bp, synthetic construct; identical to SEQ ID NO: 1870
  misc_feature 1..363: note = Description of Artificial Sequence: Synthetic polynucleotide
  source 1..363: mol_type = other DNA

SEQ ID NO: 1873 - DNA, 363 bp, synthetic construct
  misc_feature 1..363: note = Description of Artificial Sequence: Synthetic polynucleotide
  source 1..363: mol_type = other DNA
caggtgcagttggtggagtctgggggaggcgtggtccagcctgggaggtccctgagactctcctgtgcagcgtctggattcaccttcagtagctatggcatacactgggtccgccaggctccaggcaaggggctggagtgggtggcagttatatggtatgatgcaagtaataagttccatgcagacgccgtgaagggccgattcaccatctccagagacaattccaagaacacgctgtatctgcaaatgaacagcctgagagccgaggactcggctatgtacttctgtgcgagaggaaaagtggctggtatgcctgaagcttttgaaatctggggccaagggacattggtcaccgtctcttca

SEQ ID NO: 1874 - DNA, 363 bp, synthetic construct
  misc_feature 1..363: note = Description of Artificial Sequence: Synthetic polynucleotide
  source 1..363: mol_type = other DNA
caggtgcagttggtggagtctgggggaggcgtggtccagcctgggaggtccctgagactctcctgtgcagcgtctggattcaccttcagtagctatggcatacactgggtccgccaggctccaggcaaggggctggagtgggtggcagttatatggtatgatgcaagtaataagttccatgcagactccgtgaagggccgattcaccatctccagagacaattccaagaacacgctgtatctgcaaatgaacagcctgagagccgaggactcggctatgtacttctgtgcgagaggaaaagtggctggtatgcctgaagcttttgaaatctggggccaagggacaaaggtcaccgtctcttca

SEQ ID NO: 1875 - DNA, 363 bp, synthetic construct
  misc_feature 1..363: note = Description of Artificial Sequence: Synthetic polynucleotide
  source 1..363: mol_type = other DNA
caggtgcagttggtggagtctgggggaggcgtggtccagcctgggaggtccctgagactctcctgtgcagcgtctggattcaccttcagtagctatggcatacactgggtccgccaggctccaggcaaggggctggagtgggtggcagttatatggtatgatggaagtaataagttccatgcagacgccgtgaagggccgattcaccatctccagagacaattccaagaacacgctgtatctgcaaatgaacagcctgagagccgaggactcggctatgtacttctgtgcgagaggaaaagtggctggtatgcctgaagcttttgaaatctggggccaagggacaaaggtcaccgtctcttca

SEQ ID NO: 1876 - DNA, 387 bp, synthetic construct
  misc_feature 1..387: note = Description of Artificial Sequence: Synthetic polynucleotide
  source 1..387: mol_type = other DNA
caaatgcagctggtgcagtctggggctgaggtgaagaagcctggggcctcagtgaaggtctcctgcaaggcttctggatacaccttcaccagttatgatatcaactgggtgcgacaggccactggacaagggcttgagtggatgggatggatgaaccctaacagtggtggcacaggctatgcacagaagttccagggcagagtcaccatgaccagggacacctccataagcacagcctacatggagctgagcagcctgagatctcaggacacggccgtgtattactgtgcgagagggggtgattacgtttgggggagttatcgtccctactactactactacggtatggacgtctggggccaagggaccacggtcaccgtctcctca

SEQ ID NO: 1877 - DNA, 387 bp, synthetic construct; identical to SEQ ID NO: 1869
  misc_feature 1..387: note = Description of Artificial Sequence: Synthetic polynucleotide
  source 1..387: mol_type = other DNA

SEQ ID NO: 1878 - DNA, 387 bp, synthetic construct; identical to SEQ ID NO: 1876
  misc_feature 1..387: note = Description of Artificial Sequence: Synthetic polynucleotide
  source 1..387: mol_type = other DNA

SEQ ID NO: 1879 - DNA, 387 bp, synthetic construct
  misc_feature 1..387: note = Description of Artificial Sequence: Synthetic polynucleotide
  source 1..387: mol_type = other DNA
caaatgcagctggtgcagtctggggctgaggtgaagaagcctggggcctcagtgaaggtctcctgcaaggcttctggatacaccttcaccagttatgatatcaactgggtgcgacaggcccctggacaagggcttgagtggatgggatggatgaaccctaacagtggtggcacaggctatgcacagaagttccagggcagagtcaccatgaccagggacacctccataagcacagcctacatggagctgagcagcctgagatctgacgacacggccgtgtattactgtgcgagagggggtgattacgtttgggggagttatcgtccctactactactactacggtatggacgtctggggccaagggaccacggtcaccgtctcctca

SEQ ID NO: 1880 - DNA, 387 bp, synthetic construct; identical to SEQ ID NO: 1876
  misc_feature 1..387: note = Description of Artificial Sequence: Synthetic polynucleotide
  source 1..387: mol_type = other DNA

SEQ ID NO: 1881 - DNA, 387 bp, synthetic construct
  misc_feature 1..387: note = Description of Artificial Sequence: Synthetic polynucleotide
  source 1..387: mol_type = other DNA
caaatgcagctggtgcagtctggggctgaggtgaagaagcctggggcctcagtgaaggtctcctgcaaggcttctggatacaccttcaccagttatgatatcaactgggtgcgacaggcccctggacaagggcttgagtggatgggatggatgaaccctaacagtggtaacacaggctatgcacagaagttccagggcagagtcaccatgaccagggacacctccataagcacagcctacatggagctgagcagcctgagatctgacgacacggccgtgtattactgtgcgagagggggtgattacgtttgggggagttatcgtccctactactactactacggtatggacgtctggggccaagggaccacggtcaccgtctcctca

SEQ ID NO: 1882 - DNA, 387 bp, synthetic construct
  misc_feature 1..387: note = Description of Artificial Sequence: Synthetic polynucleotide
  source 1..387: mol_type = other DNA
caaatgcagctggtgcagtctggggctgaggtgaagaagcctggggcctcagtgaaggtctcctgcaaggcttctggatacaccttcaccagttatgatatcaactgggtgcgacaggccactggacaagggcttgagtggatgggatggatgaaccctaacagtggtggcacaggctatgcacagaagttccagggcagagtcaccatgaccagggacacctccataagcacagcctacatggagctgagcagcctgagatctcaggacacggccgtgtattactgtgcgagagggggtgattacgttttcgggagttatcgtccctactactactactacggtatggacgtctggggccaagggaccacggtcaccgtctcctca

SEQ ID NO: 1883 - DNA, 387 bp, synthetic construct
  misc_feature 1..387: note = Description of Artificial Sequence: Synthetic polynucleotide
  source 1..387: mol_type = other DNA
caaatgcagctggtgcagtctggggctgaggtgaagaagcctggggcctcagtgaaggtctcctgcaaggcttctggatacaccttcaccagttatgatatcaactgggtgcgacaggcccctggacaagggcttgagtggatgggatggatgaaccctaacagtggtggcacaggctatgcacagaagttccagggcagagtcaccatgaccagggacacctccataagcacagcctacatggagctgagcagcctgagatctgacgacacggccgtgtattactgtgcgagagggggtgattacgttttcgggagttatcgtccctactactactactacggtatggacgtctggggccaagggaccacggtcaccgtctcctca

SEQ ID NO: 1884 - DNA, 363 bp, synthetic construct; identical to SEQ ID NO: 1873
  misc_feature 1..363: note = Description of Artificial Sequence: Synthetic polynucleotide
  source 1..363: mol_type = other DNA

SEQ ID NO: 1885 - DNA, 648 bp, synthetic construct
  misc_feature 1..648: note = Description of Artificial Sequence: Synthetic polynucleotide
  source 1..648: mol_type = other DNA
cagtctgtgctgactcagccaccctcagcgtctgggacccccgggcagagggtcaccatctcttgttctggaagtagctccaacatcggaagtaatactgtaaactggtaccagcacctcccaggaacggcccccaaactcctcatctatactaataatcagcggccctcaggggtccctgaccgattctctggctccaagtctggcacctcagcctcccttgccatcagtgggctccagtctgaggatgaggctgattatttctgtgcaacattcgatgacagcctgaatggtccggtattcggcggagggaccaagctgaccgtcctaggtcagcccaaggctgccccctcggtcactctgttcccgccctcctctgaggagcttcaagccaacaaggccacactggtgtgtctcataagtgacttctacccgggagccgtgacagtggcctggaaggcagatagcagccccgtcaaggcgggagtggagaccaccacaccctccaaacaaagcaacaacaagtacgcggccagcagctatctgagcctgacgcctgagcagtggaagtcccacagaagctacagctgccaggtcacgcatgaagggagcaccgtggagaagacagtggcccctacagaatgttca

SEQ ID NO: 1886 - DNA, 642 bp, synthetic construct
  misc_feature 1..642: note = Description of Artificial Sequence: Synthetic polynucleotide
  source 1..642: mol_type = other DNA
gacatccagatgacccagtctccatcctccctgtctgcatctataggagacagagtcaccatcacttgccgggcaagtcaggacattagagattatttaggctggtatcagcagaaaccagggaaagcccctaagcgcctgatctatggtgcatccagtttgcaaagtggggtcccttcaaggttcagcggcagtggatctgggacagaattcactctcacaatcagcagcctgcagcctgaagatttcgcaacttattactgtctacagcataataattaccccttcactttcggccctgggaccaaagtggatatcaaacgaacggtggctgcaccatctgtcttcatcttcccgccatctgatgagcagttgaaatctggaactgcctctgttgtgtgcctgctgaataacttctatcccagagaggccaaagtacagtggaaggtggataacgccctccaatcgggtaactcccaggagagtgtcacagagcaggacagcaaggacagcacctacagcctcagcagcaccctgacgctgagcaaagcagactacgagaaacacaaagtctacgcctgcgaagtcacccatcagggcctgagctcgcccgtcacaaagagcttcaacaggggagagtgt

SEQ ID NO: 1887 - DNA, 642 bp, synthetic construct; identical to SEQ ID NO: 1886
  misc_feature 1..642: note = Description of Artificial Sequence: Synthetic polynucleotide
  source 1..642: mol_type = other DNA

SEQ ID NO: 1888 - DNA, 639 bp, synthetic construct
  misc_feature 1..639: note = Description of Artificial Sequence: Synthetic polynucleotide
  source 1..639: mol_type = other DNA
gacatccagatgacccagtctccatcctccctgtctgcatctgtaggagacagagtcaccatcacttgccaggcgagtcaggacattagcaactatttaaattggtatcagcagaaaccagggaaagcccctaagctcctgatctacgatgcatccaatttggaaacaggggtcccatcaaggttcagtggaagtggatctgggacagattttagtttcaccatcagcagcctgcagcctgaagatattgcaacatattactgtcaacagtatgatattctcctcactttcggcggagggaccaaggtggagatcaagcgaacggtggctgcaccatctgtcttcatcttcccgccatctgatgagcagttgaaatctggaactgcctctgttgtgtgcctgctgaataacttctatcccagagaggccaaagtacagtggaaggtggataacgccctccaatcgggtaactcccaggagagtgtcacagagcaggacagcaaggacagcacctacagcctcagcagcaccctgacgctgagcaaagcagactacgagaaacacaaagtctacgcctgcgaagtcacccatcagggcctgagctcgcccgtcacaaagagcttcaacaggggagagtgt

SEQ ID NO: 1889 - DNA, 660 bp, synthetic construct
  misc_feature 1..660: note = Description of Artificial Sequence: Synthetic polynucleotide
  source 1..660: mol_type = other DNA
gacatcgtgatgacccagtctccagactccctggctgtgtctctgggcgagagggccaccatcaactgcaagtccagccagagtgttttatccagctccaacaataagaactacatagcttggtaccagcagcaaccaggacatcctcctaagctgctcatttactgggcatctacccgggaatccggggtccctgaccgattcagtggcagcgggtctgggacagatttcactctcaccatcagcagcctgcaggctgaagatgtggcagttttttactgtcaacaatattatagtactccgtggacgttcggccaagggaccaaggtggaaatcaaacgaacggtggctgcaccatctgtcttcatcttcccgccatctgatgagcagttgaaatctggaactgcctctgttgtgtgcctgctgaataacttctatcccagagaggccaaagtacagtggaaggtggataacgccctccaatcgggtaactcccaggagagtgtcacagagcaggacagcaaggacagcacctacagcctcagcagcaccctgacgctgagcaaagcagactacgagaaacacaaagtctacgcctgcgaagtcacccatcagggcctgagctcgcccgtcacaaagagcttcaacaggggagagtgt

SEQ ID NO: 1890 - DNA, 660 bp, synthetic construct
  misc_feature 1..660: note = Description of Artificial Sequence: Synthetic polynucleotide
  source 1..660: mol_type = other DNA
gacatcgtgatgacccagtctccagactccctggctgtgtctctgggcgagagggccaccatcaactgcaagtccagccagagtgttttatccagctccaacaataagaactacatagcttggtaccagcagaaaccaggacatcctcctaagctgctcatttactgggcatctacccgggaatccggggtccctgaccgattcagtggcagcgggtctgggacagatttcactctcaccatcagcagcctgcaggctgaagatgtggcagttttttactgtcaacaatattatagtactccgtggacgttcggccaagggaccaaggtggaaatcaaacgaacggtggctgcaccatctgtcttcatcttcccgccatctgatgagcagttgaaatctggaactgcctctgttgtgtgcctgctgaataacttctatcccagagaggccaaagtacagtggaaggtggataacgccctccaatcgggtaactcccaggagagtgtcacagagcaggacagcaaggacagcacctacagcctcagcagcaccctgacgctgagcaaagcagactacgagaaacacaaagtctacgcctgcgaagtcacccatcagggcctgagctcgcccgtcacaaagagcttcaacaggggagagtgt

SEQ ID NO: 1891 - DNA, 660 bp, synthetic construct
  misc_feature 1..660: note = Description of Artificial Sequence: Synthetic polynucleotide
  source 1..660: mol_type = other DNA
gacatcgtgatgacccagtctccagactccctgtctgtgtctctgggcgagagggccaccatcaactgcaagtccagccagagtgttttatccagctccaacaataagaactacttagcttggtaccaacagaaaccaggacagcctcctaacctgctcatttactggacttctacccgagattccggggtccctgaccgattcagtggcagcgggtctgggacagatttcactctcaccatcaacagcctgcaggctgaagatgtggctgtttattactgtcagcaatattatcgtactccgtggacgttcggccaagggaccaaggtggaaatcaaacgaacggtggctgcaccatctgtcttcatcttcccgccatctgatgagcagttgaaatctggaactgcctctgttgtgtgcctgctgaataacttctatcccagagaggccaaagtacagtggaaggtggataacgccctccaatcgggtaactcccaggagagtgtcacagagcaggacagcaaggacagcacctacagcctcagcagcaccctgacgctgagcaaagcagactacgagaaacacaaagtctacgcctgcgaagtcacccatcagggcctgagctcgcccgtcacaaagagcttcaacaggggagagtgt

SEQ ID NO: 1892 - DNA, 660 bp, synthetic construct
  misc_feature 1..660: note = Description of Artificial Sequence: Synthetic polynucleotide
  source 1..660: mol_type = other DNA
gacatcgtgatgacccagtctccagactccctgtctgtgtctctgggcgagagggccaccatcaactgcaagtccagccagagtgttttatccagctccaacaataagaactacttagcttggtaccagcagaaaccaggacagcctcctaacctgctcatttactggacttctacccgagattccggggtccctgaccgattcagtggcagcgggtctgggacagatttcactctcaccatcaacagcctgcaggctgaagatgtggctgtttattactgtcagcaatattatcgtactccgtggacgttcggccaagggaccaaggtggaaatcaaacgaacggtggctgcaccatctgtcttcatcttcccgccatctgatgagcagttgaaatctggaactgcctctgttgtgtgcctgctgaataacttctatcccagagaggccaaagtacagtggaaggtggataacgccctccaatcgggtaactcccaggagagtgtcacagagcaggacagcaaggacagcacctacagcctcagcagcaccctgacgctgagcaaagcagactacgagaaacacaaagtctacgcctgcgaagtcacccatcagggcctgagctcgcccgtcacaaagagcttcaacaggggagagtgt

SEQ ID NO: 1893 - DNA, 645 bp, synthetic construct
  misc_feature 1..645: note = Description of Artificial Sequence: Synthetic polynucleotide
  source 1..645: mol_type = other DNA
gaaattgtgttgacgcagtctccaggcaccctgtctttgtctccaggggaaagagccaccctctcctgcagggccagtcagagtattagttacagttacttagcctggtaccagcagaaacctggccaggctccccggctcctcatctatggtgcatccagcagggccactggcatcccagacaggttcagtggcagtgggtctgggacagacttcactctcaccatcagcagacaggagcctgatgattttgcagtgtattactgtcagcagtatggtagttcaccgctcactttcggcggagggaccaaggtggagatcaaacgaacggtggctgcaccatctgtcttcatcttcccgccatctgatgagcagttgaaatctggaactgcctctgttgtgtgcctgctgaataacttctatcccagagaggccaaagtacagtggaaggtggataacgccctccaatcgggtaactcccaggagagtgtcacagagcaggacagcaaggacagcacctacagcctcagcagcaccctgacgctgagcaaagcagactacgagaaacacaaagtctacgcctgcgaagtcacccatcagggcctgagctcgcccgtcacaaagagcttcaacaggggagagtgt

SEQ ID NO: 1894 - DNA, 642 bp, synthetic construct
  misc_feature 1..642: note = Description of Artificial Sequence: Synthetic polynucleotide
  source 1..642: mol_type = other DNA
gaaatagtgatgacgcagtctccagccaccctgtctgtgtctccaggggaaagagccaccctctcctgcagggccagtcagagtgttagcagcaacttagcctggtaccagcagaaacctggccaggctcccaggctcctcatctatggtgcagccaccagggccactggtatcccagccagggtcagtggcagtgggtctgggacagagttcactctcaccatcagcagcctgcagtctgaagattttgcagtttattactgtcagcagtataataactggcctctcactttcggcggagggaccaaggtggagatcaaacgaacggtggctgcaccatctgtcttcatcttcccgccatctgatgagcagttgaaatctggaactgcctctgttgtgtgcctgctgaataacttctatcccagagaggccaaagtacagtggaaggtggataacgccctccaatcgggtaactcccaggagagtgtcacagagcaggacagcaaggacagcacctacagcctcagcagcaccctgacgctgagcaaagcagactacgagaaacacaaagtctacgcctgcgaagtcacccatcagggcctgagctcgcccgtcacaaagagcttcaacaggggagagtgt

SEQ ID NO: 1895 - DNA, 642 bp, synthetic construct
  misc_feature 1..642: note = Description of Artificial Sequence: Synthetic polynucleotide
  source 1..642: mol_type = other DNA
gacattcagatgacccagtctccatcctccctgtctgcatctgtaggagacagagtcaccatcacttgccgggcaagtcagggcattagaaatgagttaggctggtatcagcagaaaccagggaaagcccctaaacgcctgatctatggtgcatccagtttgcaaagtggggtcccatcaaggttcagcggcagtggatctgggacagagttcactctcacaatcagcagcctgcagcctgaagattttgtaacttattactgtctacagcataatagttacccattcactttcggccctgggaccaaagtggatgtcaaacgaacggtggctgcaccatctgtcttcatcttcccgccatctgatgagcagttgaaatctggaactgcctctgttgtgtgcctgctgaataacttctatcccagagaggccaaagtacagtggaaggtggataacgccctccaatcgggtaactcccaggagagtgtcacagagcaggacagcaaggacagcacctacagcctcagcagcaccctgacgctgagcaaagcagactacgagaaacacaaagtctacgcctgcgaagtcacccatcagggcctgagctcgcccgtcacaaagagcttcaacaggggagagtgt

SEQ ID NO: 1896 - DNA, 639 bp, synthetic construct
  misc_feature 1..639: note = Description of Artificial Sequence: Synthetic polynucleotide
  source 1..639: mol_type = other DNA
gacatccagatgacccagtctccatcctccctgtctgcatctgtgggggacagagtcaccatcacttgccaggcgagtcaggacattaccaactatttaaattggtatcagcagaaaccagggaaagcccctaaactcctgatctacgatgcttccaatttggagccaggggtcccatcaaggttcagtggaagtggatctgggacagattttactttcaccatcagcagcctgcagcctgaagatattgcaacatattactgtcaacagtatgatgatctattcactttcggccctgggaccaaagtggatatcaaacgaacggtggctgcaccatctgtcttcatcttcccgccatctgatgagcagttgaaatctggaactgcctctgttgtgtgcctgctgaataacttctatcccagagaggccaaagtacagtggaaggtggataacgccctccaatcgggtaactcccaggagagtgtcacagagcaggacagcaaggacagcacctacagcctcagcagcaccctgacgctgagcaaagcagactacgagaaacacaaagtctacgcctgcgaagtcacccatcagggcctgagctcgcccgtcacaaagagcttcaacaggggagagtgt

SEQ ID NO: 1897 - DNA, 642 bp, synthetic construct
  misc_feature 1..642: note = Description of Artificial Sequence: Synthetic polynucleotide
  source 1..642: mol_type = other DNA
gacatccagatgacccagtctccatcttccgtgtctgcatctgtaggagacagagtcaccatcacttgtcgggcgagtcagggtcttatcatctggttagcctggtatcagcagaaaccggggaaagcccctaaactcctgatctatgctgcatccagtttgcaaagtggggtcccatcaaggttcagcggcagtggctctgggacagatttcactctcaccatcagcagcctacagcctgaagattttgcaacttactattgtcaacagactaacagtttccctccgacgttcggccaagggaccaaggtggaaatcaaacgaacggtggctgcaccatctgtcttcatcttcccgccatctgatgagcagttgaaatctggaactgcctctgttgtgtgcctgctgaataacttctatcccagagaggccaaagtacagtggaaggtggataacgccctccaatcgggtaactcccaggagagtgtcacagagcaggacagcaaggacagcacctacagcctcagcagcaccctgacgctgagcaaagcagactacgagaaacacaaagtctacgcctgcgaagtcacccatcagggcctgagctcgcccgtcacaaagagcttcaacaggggagagtgt

SEQ ID NO: 1898 - DNA, 642 bp, synthetic construct; identical to SEQ ID NO: 1897
  misc_feature 1..642: note = Description of Artificial Sequence: Synthetic polynucleotide
  source 1..642: mol_type = other DNA

SEQ ID NO: 1899 - DNA, 642 bp, synthetic construct
  misc_feature 1..642: note = Description of Artificial Sequence: Synthetic polynucleotide
  source 1..642: mol_type = other DNA
gacattcagatgacccagtctccatcctccctgtctgcatctgtaggagacagagtcaccatcacttgccgggcaagtcagggcattagaaatgagttaggctggtatcagcagaaaccagggaaagcccctaaactcctgatctatggtgcatccagtttgcaaagtggggtcccatcaaggttcagcggcagtggatctgggacagagttcactctcacaatcagcagcctgcagcctgaagattttgtaacttattactgtctacagcataatagttacccattcactttcggccaagggaccaaagtggatgtcaaacgaacggtggctgcaccatctgtcttcatcttcccgccatctgatgagcagttgaaatctggaactgcctctgttgtgtgcctgctgaataacttctatcccagagaggccaaagtacagtggaaggtggataacgccctccaatcgggtaactcccaggagagtgtcacagagcaggacagcaaggacagcacctacagcctcagcagcaccctgacgctgagcaaagcagactacgagaaacacaaagtctacgcctgcgaagtcacccatcagggcctgagctcgcccgtcacaaagagcttcaacaggggagagtgt

SEQ ID NO: 1900 - DNA, 642 bp, synthetic construct; identical to SEQ ID NO: 1899
  misc_feature 1..642: note = Description of Artificial Sequence: Synthetic polynucleotide
  source 1..642: mol_type = other DNA

SEQ ID NO: 1901 - DNA, 642 bp, synthetic construct; identical to SEQ ID NO: 1899
  misc_feature 1..642: note = Description of Artificial Sequence: Synthetic polynucleotide
  source 1..642: mol_type = other DNA

SEQ ID NO: 1902 - DNA, 642 bp, synthetic construct
  misc_feature 1..642: note = Description of Artificial Sequence: Synthetic polynucleotide
  source 1..642: mol_type = other DNA
gacattcagatgacccagtctccatcctccctgtctgcatctgtaggagacagagtcaccatcacttgccgggcaagtcagggcattagaaatgagttaggctggtatcagcagaaaccagggaaagcccctaaactcctgatctatggtgcatccagtttgcaaagtggggtcccatcaaggttcagcggcagtggatctgggacagagttcactctcacaatcagcagcctgcagcctgaagattttgtaacttattactgtctacagcataatagttacccattcactttcggccctgggaccaaagtggatgtcaaacgaacggtggctgcaccatctgtcttcatcttcccgccatctgatgagcagttgaaatctggaactgcctctgttgtgtgcctgctgaataacttctatcccagagaggccaaagtacagtggaaggtggataacgccctccaatcgggtaactcccaggagagtgtcacagagcaggacagcaaggacagcacctacagcctcagcagcaccctgacgctgagcaaagcagactacgagaaacacaaagtctacgcctgcgaagtcacccatcagggcctgagctcgcccgtcacaaagagcttcaacaggggagagtgt

SEQ ID NO: 1903 - DNA, 642 bp, synthetic construct
  misc_feature 1..642: note = Description of Artificial Sequence: Synthetic polynucleotide
  source 1..642: mol_type = other DNA
gacattcagatgacccagtctccatcctccctgtctgcatctgtaggagacagagtcaccatcacttgccgggcaagtcagggcattagaaatgagttaggctggtatcagcagaaaccagggaaagcccctaaacgcctgatctatggtgcatccagtttgcaaagtggggtcccatcaaggttcagcggcagtggatctgggacagagttcactctcacaatcagcagcctgcagcctgaagattttgtaacttattactgtctacagcataatagttacccattcactttcggccaagggaccaaagtggatgtcaaacgaacggtggctgcaccatctgtcttcatcttcccgccatctgatgagcagttgaaatctggaactgcctctgttgtgtgcctgctgaataacttctatcccagagaggccaaagtacagtggaaggtggataacgccctccaatcgggtaactcccaggagagtgtcacagagcaggacagcaaggacagcacctacagcctcagcagcaccctgacgctgagcaaagcagactacgagaaacacaaagtctacgcctgcgaagtcacccatcagggcctgagctcgcccgtcacaaagagcttcaacaggggagagtgt

SEQ ID NO: 1904 - DNA, 642 bp, synthetic construct; identical to SEQ ID NO: 1899
  misc_feature 1..642: note = Description of Artificial Sequence: Synthetic polynucleotide
  source 1..642: mol_type = other DNA

SEQ ID NO: 1905 - DNA, 642 bp, synthetic construct
  misc_feature 1..642: note = Description of Artificial Sequence: Synthetic polynucleotide
  source 1..642: mol_type = other DNA
gacatccagatgacccagtctccatcctccctgtctgcatctataggagacagagtcaccatcacttgccgggcaagtcaggacattagagattatttaggctggtatcagcagaaaccagggaaagcccctaagctcctgatctatggtgcatccagtttgcaaagtggggtcccttcaaggttcagcggcagtggatctgggacagaattcactctcacaatcagcagcctgcagcctgaagatttcgcaacttattactgtctacagcataataattaccccttcactttcggccaagggaccaaagtggatatcaaacgaacggtggctgcaccatctgtcttcatcttcccgccatctgatgagcagttgaaatctggaactgcctctgttgtgtgcctgctgaataacttctatcccagagaggccaaagtacagtggaaggtggataacgccctccaatcgggtaactcccaggagagtgtcacagagcaggacagcaaggacagcacctacagcctcagcagcaccctgacgctgagcaaagcagactacgagaaacacaaagtctacgcctgcgaagtcacccatcagggcctgagctcgcccgtcacaaagagcttcaacaggggagagtgt

SEQ ID NO: 1906 - DNA, 642 bp, synthetic construct
  misc_feature 1..642: note = Description of Artificial Sequence: Synthetic polynucleotide
  source 1..642: mol_type = other DNA
gacatccagatgacccagtctccatcctccctgtctgcatctataggagacagagtcaccatcacttgccgggcaagtcaggacattagagattatttaggctggtatcagcagaaaccagggaaagcccctaagcgcctgatctatggtgcatccagtttgcaaagtggggtcccttcaaggttcagcggcagtggatctgggacagaattcactctcacaatcagcagcctgcagcctgaagatttcgcaacttattactgtctacagcataataattaccccttcactttcggccaagggaccaaagtggatatcaaacgaacggtggctgcaccatctgtcttcatcttcccgccatctgatgagcagttgaaatctggaactgcctctgttgtgtgcctgctgaataacttctatcccagagaggccaaagtacagtggaaggtggataacgccctccaatcgggtaactcccaggagagtgtcacagagcaggacagcaaggacagcacctacagcctcagcagcaccctgacgctgagcaaagcagactacgagaaacacaaagtctacgcctgcgaagtcacccatcagggcctgagctcgcccgtcacaaagagcttcaacaggggagagtgt

SEQ ID NO: 1907 - DNA, 642 bp, synthetic construct
  misc_feature 1..642: note = Description of Artificial Sequence: Synthetic polynucleotide
  source 1..642: mol_type = other DNA
gacatccagatgacccagtctccatcctccctgtctgcatctataggagacagagtcaccatcacttgccgggcaagtcaggacattagagattatttaggctggtatcagcagaaaccagggaaagcccctaagctcctgatctatggtgcatccagtttgcaaagtggggtcccttcaaggttcagcggcagtggatctgggacagaattcactctcacaatcagcagcctgcagcctgaagatttcgcaacttattactgtctacagcataataattaccccttcactttcggccctgggaccaaagtggatatcaaacgaacggtggctgcaccatctgtcttcatcttcccgccatctgatgagcagttgaaatctggaactgcctctgttgtgtgcctgctgaataacttctatcccagagaggccaaagtacagtggaaggtggataacgccctccaatcgggtaactcccaggagagtgtcacagagcaggacagcaaggacagcacctacagcctcagcagcaccctgacgctgagcaaagcagactacgagaaacacaaagtctacgcctgcgaagtcacccatcagggcctgagctcgcccgtcacaaagagcttcaacaggggagagtgt

SEQ ID NO: 1908 - DNA, 642 bp, synthetic construct; identical to SEQ ID NO: 1905
  misc_feature 1..642: note = Description of Artificial Sequence: Synthetic polynucleotide
  source 1..642: mol_type = other DNA

SEQ ID NO: 1909 - DNA, 642 bp, synthetic construct; identical to SEQ ID NO: 1905
  misc_feature 1..642: note = Description of Artificial Sequence: Synthetic polynucleotide
  source 1..642: mol_type = other DNA

SEQ ID NO: 1910 - DNA, 642 bp, synthetic construct; identical to SEQ ID NO: 1905
  misc_feature 1..642: note = Description of Artificial Sequence: Synthetic polynucleotide
  source 1..642: mol_type = other DNA

SEQ ID NO: 1911 - DNA, 642 bp, synthetic construct; identical to SEQ ID NO: 1905
  misc_feature 1..642: note = Description of Artificial Sequence: Synthetic polynucleotide
  source 1..642: mol_type = other DNA

SEQ ID NO: 1912 - DNA, 642 bp, synthetic construct
  misc_feature 1..642: note = Description of Artificial Sequence: Synthetic polynucleotide
  source 1..642: mol_type = other DNA
gacatccagatgacccagtctccatcctccctgtctgcatctataggagacagagtcaccatcacttgccgggcaagtcaggaccttagaaattatttaggctggtatcaccagaaaccagggaaagcccctaagcgcctgatctatggtgcatccagtttgcaaagtggggtcccttcaaggttcagcggcagtggatctgggacagaattcactctcacaatcagcagcctgcagcctgaagatttcgcaacttattactgtctacagcataataattaccccttcactttcggccctgggaccaaagtggatatcaaacgaacggtggctgcaccatctgtcttcatcttcccgccatctgatgagcagttgaaatctggaactgcctctgttgtgtgcctgctgaataacttctatcccagagaggccaaagtacagtggaaggtggataacgccctccaatcgggtaactcccaggagagtgtcacagagcaggacagcaaggacagcacctacagcctcagcagcaccctgacgctgagcaaagcagactacgagaaacacaaagtctacgcctgcgaagtcacccatcagggcctgagctcgcccgtcacaaagagcttcaacaggggagagtgt

SEQ ID NO: 1913 - DNA, 642 bp, synthetic construct
  misc_feature 1..642: note = Description of Artificial Sequence: Synthetic polynucleotide
  source 1..642: mol_type = other DNA
gacatccagatgacccagtctccatcctccctgtctgcatctataggagacagagtcaccatcacttgccgggcaagtcaggaccttagaaattatttaggctggtatcaacagaaaccagggaaagcccctaagctcctgatctatggtgcatccagtttgcaaagtggggtcccttcaaggttcagcggcagtggatctgggacagaattcactctcacaatcagcagcctgcagcctgaagatttcgcaacttattactgtctacagcataataattaccccttcactttcggccctgggaccaaagtggatatcaaacgaacggtggctgcaccatctgtcttcatcttcccgccatctgatgagcagttgaaatctggaactgcctctgttgtgtgcctgctgaataacttctatcccagagaggccaaagtacagtggaaggtggataacgccctccaatcgggtaactcccaggagagtgtcacagagcaggacagcaaggacagcacctacagcctcagcagcaccctgacgctgagcaaagcagactacgagaaacacaaagtctacgcctgcgaagtcacccatcagggcctgagctcgcccgtcacaaagagcttcaacaggggagagtgt

SEQ ID NO: 1914 - DNA, 642 bp, synthetic construct; identical to SEQ ID NO: 1913
  misc_feature 1..642: note = Description of Artificial Sequence: Synthetic polynucleotide
  source 1..642: mol_type = other DNA

SEQ ID NO: 1915 - DNA, 642 bp, synthetic construct
  misc_feature 1..642: note = Description of Artificial Sequence: Synthetic polynucleotide
  source 1..642: mol_type = other DNA
gacatccagatgacccagtctccatcctccctgtctgcatctataggagacagagtcaccatcacttgccgggcaagtcaggaccttagaaattatttaggctggtatcaccagaaaccagggaaagcccctaagctcctgatctatggtgcatccagtttgcaaagtggggtcccttcaaggttcagcggcagtggatctgggacagaattcactctcacaatcagcagcctgcagcctgaagatttcgcaacttattactgtctacagcataataattaccccttcactttcggccctgggaccaaagtggatatcaaacgaacggtggctgcaccatctgtcttcatcttcccgccatctgatgagcagttgaaatctggaactgcctctgttgtgtgcctgctgaataacttctatcccagagaggccaaagtacagtggaaggtggataacgccctccaatcgggtaactcccaggagagtgtcacagagcaggacagcaaggacagcacctacagcctcagcagcaccctgacgctgagcaaagcagactacgagaaacacaaagtctacgcctgcgaagtcacccatcagggcctgagctcgcccgtcacaaagagcttcaacaggggagagtgt

SEQ ID NO: 1916 - DNA, 642 bp, synthetic construct
  misc_feature 1..642: note = Description of Artificial Sequence: Synthetic polynucleotide
  source 1..642: mol_type = other DNA
gacatccagatgacccagtctccatcctccctgtctgcatctataggagacagagtcaccatcacttgccgggcaagtcaggaccttagaaattatttaggctggtatcaacagaaaccagggaaagcccctaagcgcctgatctatggtgcatccagtttgcaaagtggggtcccttcaaggttcagcggcagtggatctgggacagaattcactctcacaatcagcagcctgcagcctgaagatttcgcaacttattactgtctacagcataataattaccccttcactttcggccctgggaccaaagtggatatcaaacgaacggtggctgcaccatctgtcttcatcttcccgccatctgatgagcagttgaaatctggaactgcctctgttgtgtgcctgctgaataacttctatcccagagaggccaaagtacagtggaaggtggataacgccctccaatcgggtaactcccaggagagtgtcacagagcaggacagcaaggacagcacctacagcctcagcagcaccctgacgctgagcaaagcagactacgagaaacacaaagtctacgcctgcgaagtcacccatcagggcctgagctcgcccgtcacaaagagcttcaacaggggagagtgt

SEQ ID NO: 1917 - DNA, 642 bp, synthetic construct; identical to SEQ ID NO: 1916
  misc_feature 1..642: note = Description of Artificial Sequence: Synthetic polynucleotide
  source 1..642: mol_type = other DNA

SEQ ID NO: 1918 - DNA, 642 bp, synthetic construct; identical to SEQ ID NO: 1915
  misc_feature 1..642: note = Description of Artificial Sequence: Synthetic polynucleotide
  source 1..642: mol_type = other DNA

SEQ ID NO: 1919 - DNA, 642 bp, synthetic construct; identical to SEQ ID NO: 1912
  misc_feature 1..642: note = Description of Artificial Sequence: Synthetic polynucleotide
  source 1..642: mol_type = other DNA

SEQ ID NO: 1920 - DNA, 642 bp, synthetic construct; identical to SEQ ID NO: 1913
  misc_feature 1..642: note = Description of Artificial Sequence: Synthetic polynucleotide
  source 1..642: mol_type = other DNA

SEQ ID NO: 1921 - DNA, 642 bp, synthetic construct; identical to SEQ ID NO: 1913
  misc_feature 1..642: note = Description of Artificial Sequence: Synthetic polynucleotide
  source 1..642: mol_type = other DNA

SEQ ID NO: 1922 - DNA, 642 bp, synthetic construct
  misc_feature 1..642: note = Description of Artificial Sequence: Synthetic polynucleotide
  source 1..642: mol_type = other DNA
gacatccagatgacccagtctccatcctccctgtctgcatctataggagacagagtcaccatcacttgccgggcaagtcaggaccttagaaattatttaggctggtatcaacagaaaccagggaaagcccctaagctcctgatctatggtgcatccagtttgcaaagtggggtcccttcaaggttcagcggcagtggatctgggacagaattcactctcacaatcagcagcctgcagcctgaagatttcgcaacttattactgtctacagcataataattaccccttcactttcggccaagggaccaaagtggatatcaaacgaacggtggctgcaccatctgtcttcatcttcccgccatctgatgagcagttgaaatctggaactgcctctgttgtgtgcctgctgaataacttctatcccagagaggccaaagtacagtggaaggtggataacgccctccaatcgggtaactcccaggagagtgtcacagagcaggacagcaaggacagcacctacagcctcagcagcaccctgacgctgagcaaagcagactacgagaaacacaaagtctacgcctgcgaagtcacccatcagggcctgagctcgcccgtcacaaagagcttcaacaggggagagtgt

SEQ ID NO: 1923 - DNA, 642 bp, synthetic construct; identical to SEQ ID NO: 1913
  misc_feature 1..642: note = Description of Artificial Sequence: Synthetic polynucleotide
  source 1..642: mol_type = other DNA

SEQ ID NO: 1924 - DNA, 639 bp, synthetic construct
  misc_feature 1..639: note = Description of Artificial Sequence: Synthetic polynucleotide
  source 1..639: mol_type = other DNA
gacatccagatgacccagtctccatcctccctgtctgcatctgtaggagacagagtcaccatcacttgccaggcgagtcaggacattagcaactatttaaattggtatcagcagaaaccagggaaagcccctaagctcctgatctacgatgcatccaatttggaaacaggggtcccatcaaggttcagtggaagtggatctgggacagattttagtctcaccatcagcagcctgcagcctgaagattttgcaacatattactgtcaacagtatgatattctcctcactttcggcggagggaccaaggtggagatcaagcgaacggtggctgcaccatctgtcttcatcttcccgccatctgatgagcagttgaaatctggaactgcctctgttgtgtgcctgctgaataacttctatcccagagaggccaaagtacagtggaaggtggataacgccctccaatcgggtaactcccaggagagtgtcacagagcaggacagcaaggacagcacctacagcctcagcagcaccctgacgctgagcaaagcagactacgagaaacacaaagtctacgcctgcgaagtcacccatcagggcctgagctcgcccgtcacaaagagcttcaacaggggagagtgt

SEQ ID NO: 1925 - DNA, 639 bp, synthetic construct; identical to SEQ ID NO: 1924
  misc_feature 1..639: note = Description of Artificial Sequence: Synthetic polynucleotide
  source 1..639: mol_type = other DNA

SEQ ID NO: 1926 - DNA, 639 bp, synthetic construct
  misc_feature 1..639: note = Description of Artificial Sequence: Synthetic polynucleotide
  source 1..639: mol_type = other DNA
gacatccagatgacccagtctccatcctccctgtctgcatctgtaggagacagagtcaccatcacttgccaggcgagtcaggacattagcaactatttaaattggtatcagcagaaaccagggaaagcccctaagctcctgatctacgatgcatccaatttggaaacaggggtcccatcaaggttcagtggaagtggatctgggacagattttagtctcaccatcagcagcctgcagcctgaagatattgcaacatattactgtcaacagtatgatattctcctcactttcggcggagggaccaaggtggagatcaagcgaacggtggctgcaccatctgtcttcatcttcccgccatctgatgagcagttgaaatctggaactgcctctgttgtgtgcctgctgaataacttctatcccagagaggccaaagtacagtggaaggtggataacgccctccaatcgggtaactcccaggagagtgtcacagagcaggacagcaaggacagcacctacagcctcagcagcaccctgacgctgagcaaagcagactacgagaaacacaaagtctacgcctgcgaagtcacccatcagggcctgagctcgcccgtcacaaagagcttcaacaggggagagtgt

SEQ ID NO: 1927 - DNA, 639 bp, synthetic construct
  misc_feature 1..639: note = Description of Artificial Sequence: Synthetic polynucleotide
  source 1..639: mol_type = other DNA
gacatccagatgacccagtctccatcctccctgtctgcatctgtaggagacagagtcaccatcacttgccaggcgagtcaggacattagcaactatttaaattggtatcagcagaaaccagggaaagcccctaagctcctgatctacgatgcatccaatttggaaacaggggtcccatcaaggttcagtggaagtggatctgggacagattttagtttcaccatcagcagcctgcagcctgaagattttgcaacatattactgtcaacagtatgatattctcctcactttcggcggagggaccaaggtggagatcaagcgaacggtggctgcaccatctgtcttcatcttcccgccatctgatgagcagttgaaatctggaactgcctctgttgtgtgcctgctgaataacttctatcccagagaggccaaagtacagtggaaggtggataacgccctccaatcgggtaactcccaggagagtgtcacagagcaggacagcaaggacagcacctacagcctcagcagcaccctgacgctgagcaaagcagactacgagaaacacaaagtctacgcctgcgaagtcacccatcagggcctgagctcgcccgtcacaaagagcttcaacaggggagagtgt

SEQ ID NO: 1928 - DNA, 639 bp, synthetic construct; identical to SEQ ID NO: 1926
  misc_feature 1..639: note = Description of Artificial Sequence: Synthetic polynucleotide
  source 1..639: mol_type = other DNA

SEQ ID NO: 1929 - DNA, 639 bp, synthetic construct; identical to SEQ ID NO: 1927
  misc_feature 1..639: note = Description of Artificial Sequence: Synthetic polynucleotide
  source 1..639: mol_type = other DNA

SEQ ID NO: 1930 - DNA, 639 bp, synthetic construct; identical to SEQ ID NO: 1888
  misc_feature 1..639: note = Description of Artificial Sequence: Synthetic polynucleotide
  source 1..639: mol_type = other DNA

SEQ ID NO: 1931 - DNA, 639 bp, synthetic construct; identical to SEQ ID NO: 1924
  misc_feature 1..639: note = Description of Artificial Sequence: Synthetic polynucleotide
  source 1..639: mol_type = other DNA

SEQ ID NO: 1932 - DNA, 639 bp, synthetic construct; identical to SEQ ID NO: 1924
  misc_feature 1..639: note = Description of Artificial Sequence: Synthetic polynucleotide
  source 1..639: mol_type = other DNA

SEQ ID NO: 1933 - DNA, 642 bp, synthetic construct; identical to SEQ ID NO: 1886
  misc_feature 1..642: note = Description of Artificial Sequence: Synthetic polynucleotide
  source 1..642: mol_type = other DNA

SEQ ID NO: 1934 - DNA, 642 bp, synthetic construct; identical to SEQ ID NO: 1886
  misc_feature 1..642: note = Description of Artificial Sequence: Synthetic polynucleotide
  source 1..642: mol_type = other DNA

SEQ ID NO: 1935 - DNA, 642 bp, synthetic construct; identical to SEQ ID NO: 1905
  misc_feature 1..642: note = Description of Artificial Sequence: Synthetic polynucleotide
  source 1..642: mol_type = other DNA

SEQ ID NO: 1936 - DNA, 642 bp, synthetic construct; identical to SEQ ID NO: 1905
  misc_feature 1..642: note = Description of Artificial Sequence: Synthetic polynucleotide
  source 1..642: mol_type = other DNA

SEQ ID NO: 1937 - DNA, 642 bp, synthetic construct; identical to SEQ ID NO: 1907
  misc_feature 1..642: note = Description of Artificial Sequence: Synthetic polynucleotide
  source 1..642: mol_type = other DNA

SEQ ID NO: 1938 - DNA, 642 bp, synthetic construct; identical to SEQ ID NO: 1907
  misc_feature 1..642: note = Description of Artificial Sequence: Synthetic polynucleotide
  source 1..642: mol_type = other DNA

SEQ ID NO: 1939 - DNA, 642 bp, synthetic construct; identical to SEQ ID NO: 1907
  misc_feature 1..642: note = Description of Artificial Sequence: Synthetic polynucleotide
  source 1..642: mol_type = other DNA

SEQ ID NO: 1940 - DNA, 639 bp, synthetic construct
  misc_feature 1..639: note = Description of Artificial Sequence: Synthetic polynucleotide
  source 1..639: mol_type = other DNA
gacatccagatgacccagtctccatcctccctgtctgcatctgtgggggacagagtcaccatcacttgccaggcgagtcaggacattaccaactatttaaattggtatcagcagaaaccagggaaagcccctaaactcctgatctacgatgcttccaatttggagccaggggtcccatcaaggttcagtggaagtggatctgggacagattttactctcaccatcagcagcctgcagcctgaagattttgcaacatattactgtcaacagtatgatgatctattcactttcggccctgggaccaaagtggatatcaaacgaacggtggctgcaccatctgtcttcatcttcccgccatctgatgagcagttgaaatctggaactgcctctgttgtgtgcctgctgaataacttctatcccagagaggccaaagtacagtggaaggtggataacgccctccaatcgggtaactcccaggagagtgtcacagagcaggacagcaaggacagcacctacagcctcagcagcaccctgacgctgagcaaagcagactacgagaaacacaaagtctacgcctgcgaagtcacccatcagggcctgagctcgcccgtcacaaagagcttcaacaggggagagtgt

SEQ ID NO: 1941 - DNA, 639 bp, synthetic construct
  misc_feature 1..639: note = Description of Artificial Sequence: Synthetic polynucleotide
  source 1..639: mol_type = other DNA
gacatccagatgacccagtctccatcctccctgtctgcatctgtgggggacagagtcaccatcacttgccaggcgagtcaggacattaccaactatttaaattggtatcagcagaaaccagggaaagcccctaaactcctgatctacgatgcttccaatttggagccaggggtcccatcaaggttcagtggaagtggatctgggacagattttactctcaccatcagcagcctgcagcctgaagatattgcaacatattactgtcaacagtatgatgatctattcactttcggccctgggaccaaagtggatatcaaacgaacggtggctgcaccatctgtcttcatcttcccgccatctgatgagcagttgaaatctggaactgcctctgttgtgtgcctgctgaataacttctatcccagagaggccaaagtacagtggaaggtggataacgccctccaatcgggtaactcccaggagagtgtcacagagcaggacagcaaggacagcacctacagcctcagcagcaccctgacgctgagcaaagcagactacgagaaacacaaagtctacgcctgcgaagtcacccatcagggcctgagctcgcccgtcacaaagagcttcaacaggggagagtgt

SEQ ID NO: 1942 - DNA, 639 bp, synthetic construct; identical to SEQ ID NO: 1940
  misc_feature 1..639: note = Description of Artificial Sequence: Synthetic polynucleotide
  source 1..639: mol_type = other DNA

SEQ ID NO: 1943 - DNA, 639 bp, synthetic construct
  misc_feature 1..639: note = Description of Artificial Sequence: Synthetic polynucleotide
  source 1..639: mol_type = other DNA
gacatccagatgacccagtctccatcctccctgtctgcatctgtgggggacagagtcaccatcacttgccaggcgagtcaggacattaccaactatttaaattggtatcagcagaaaccagggaaagcccctaaactcctgatctacgatgcttccaatttggagccaggggtcccatcaaggttcagtggaagtggatctgggacagattttactttcaccatcagcagcctgcagcctgaagattttgcaacatattactgtcaacagtatgatgatctattcactttcggccctgggaccaaagtggatatcaaacgaacggtggctgcaccatctgtcttcatcttcccgccatctgatgagcagttgaaatctggaactgcctctgttgtgtgcctgctgaataacttctatcccagagaggccaaagtacagtggaaggtggataacgccctccaatcgggtaactcccaggagagtgtcacagagcaggacagcaaggacagcacctacagcctcagcagcaccctgacgctgagcaaagcagactacgagaaacacaaagtctacgcctgcgaagtcacccatcagggcctgagctcgcccgtcacaaagagcttcaacaggggagagtgt

SEQ ID NO: 1944 - DNA, 639 bp, synthetic construct; identical to SEQ ID NO: 1941
  misc_feature 1..639: note = Description of Artificial Sequence: Synthetic polynucleotide
  source 1..639: mol_type = other DNA

SEQ ID NO: 1945 - DNA, 639 bp, synthetic construct; identical to SEQ ID NO: 1943
  misc_feature 1..639: note = Description of Artificial Sequence: Synthetic polynucleotide
  source 1..639: mol_type = other DNA

SEQ ID NO: 1946 - DNA, 639 bp, synthetic construct; identical to SEQ ID NO: 1896
  misc_feature 1..639: note = Description of Artificial Sequence: Synthetic polynucleotide
  source 1..639: mol_type = other DNA

SEQ ID NO: 1947 - DNA, 639 bp, synthetic construct; identical to SEQ ID NO: 1940
  misc_feature 1..639: note = Description of Artificial Sequence: Synthetic polynucleotide
  source 1..639: mol_type = other DNA

SEQ ID NO: 1948 - DNA, 639 bp, synthetic construct; identical to SEQ ID NO: 1940
  misc_feature 1..639: note = Description of Artificial Sequence: Synthetic polynucleotide
  source 1..639: mol_type = other DNA

SEQ ID NO: 1949 - DNA, 639 bp, synthetic construct
  misc_feature 1..639: note = Description of Artificial Sequence: Synthetic polynucleotide
  source 1..639: mol_type = other DNA
gacatccagatgacccagtctccatcctccctgtctgcatctgtgggggacagagtcaccatcacttgccaggcgagtcaggacattaccaactatttaaattggtatcagcagaaaccagggaaagcccctaaactcctgatctacgatgcttccaatttggagccaggggtcccatcaaggttcagtggaagtggatctgggacagattttactctcaccatcagcagcctgcagcctgaagattttgcaacatattactgtcaacagtatgatgatctattcactttcggccaagggaccaaagtggatatcaaacgaacggtggctgcaccatctgtcttcatcttcccgccatctgatgagcagttgaaatctggaactgcctctgttgtgtgcctgctgaataacttctatcccagagaggccaaagtacagtggaaggtggataacgccctccaatcgggtaactcccaggagagtgtcacagagcaggacagcaaggacagcacctacagcctcagcagcaccctgacgctgagcaaagcagactacgagaaacacaaagtctacgcctgcgaagtcacccatcagggcctgagctcgcccgtcacaaagagcttcaacaggggagagtgt

SEQ ID NO: 1950 - DNA, 639 bp, synthetic construct; identical to SEQ ID NO: 1949
  misc_feature 1..639: note = Description of Artificial Sequence: Synthetic polynucleotide
  source 1..639: mol_type = other DNA

SEQ ID NO: 1951 - DNA, 642 bp, synthetic construct
  misc_feature 1..642: note = Description of Artificial Sequence: Synthetic polynucleotide
  source 1..642: mol_type = other DNA
gaaattgtgttgacgcagtctccaggcaccctgtctttgtctccaggggaaagagccaccctctcctgcagggccagtcagatttttaccagcacctacttagcctggtaccagcagaaacctggccaggctcccaggctcctcatctatggtgcatccagcagggccactggcatcccagacaggttcagtggcagtgggtctgggacagacttcactctcaccatcagcagattggagcctgaagattttgcagtgtattactgtcagcagtatggtagctcacctcgcttcggccaagggacacgactggagattaaacgaacggtggctgcaccatctgtcttcatcttcccgccatctgatgagcagttgaaatctggaactgcctctgttgtgtgcctgctgaataacttctatcccagagaggccaaagtacagtggaaggtggataacgccctccaatcgggtaactcccaggagagtgtcacagagcaggacagcaaggacagcacctacagcctcagcagcaccctgacgctgagcaaagcagactacgagaaacacaaagtctacgcctgcgaagtcacccatcagggcctgagctcgcccgtcacaaagagcttcaacaggggagagtgt

SEQ ID NO: 1952 - DNA, 642 bp, synthetic construct; identical to SEQ ID NO: 1951
  misc_feature 1..642: note = Description of Artificial Sequence: Synthetic polynucleotide
  source 1..642: mol_type = other DNA

SEQ ID NO: 1953 - DNA, 642 bp, synthetic construct; identical to SEQ ID NO: 1951
  misc_feature 1..642: note = Description of Artificial Sequence: Synthetic polynucleotide
  source 1..642: mol_type = other DNA

SEQ ID NO: 1954 - DNA, 642 bp, synthetic construct; identical to SEQ ID NO: 1951
  misc_feature 1..642: note = Description of Artificial Sequence: Synthetic polynucleotide
  source 1..642: mol_type = other DNA

SEQ ID NO: 1955 - DNA, 642 bp, synthetic construct
  misc_feature 1..642: note = Description of Artificial Sequence: Synthetic polynucleotide
  source 1..642: mol_type = other DNA
gaaatagtgatgacgcagtctccagccaccctgtctgtgtctccaggggaaagagccaccctctcctgcagggccagtcagagtgttagcagcaacttagcctggtaccagcagaaacctggccaggctcccaggctcctcatctatggtgcagccaccagggccactggtatcccagccaggttcagtggcagtgggtctgggacagagttcactctcaccatcagcagcctgcagtctgaagattttgcagtttattactgtcagcagtataataactggcctctcactttcggcggagggaccaaggtggagatcaaacgaacggtggctgcaccatctgtcttcatcttcccgccatctgatgagcagttgaaatctggaactgcctctgttgtgtgcctgctgaataacttctatcccagagaggccaaagtacagtggaaggtggataacgccctccaatcgggtaactcccaggagagtgtcacagagcaggacagcaaggacagcacctacagcctcagcagcaccctgacgctgagcaaagcagactacgagaaacacaaagtctacgcctgcgaagtcacccatcagggcctgagctcgcccgtcacaaagagcttcaacaggggagagtgt

SEQ ID NO: 1956 - DNA, 642 bp, synthetic construct; identical to SEQ ID NO: 1955
  misc_feature 1..642: note = Description of Artificial Sequence: Synthetic polynucleotide
  source 1..642: mol_type = other DNA

SEQ ID NO: 1957 - DNA, 642 bp, synthetic construct; identical to SEQ ID NO: 1955
  misc_feature 1..642: note = Description of Artificial Sequence: Synthetic polynucleotide
  source 1..642: mol_type = other DNA

SEQ ID NO: 1958 - DNA, 642 bp, synthetic construct; identical to SEQ ID NO: 1894
  misc_feature 1..642: note = Description of Artificial Sequence: Synthetic polynucleotide
  source 1..642: mol_type = other DNA

SEQ ID NO: 1959 - DNA, 642 bp, synthetic construct
  misc_feature 1..642: note = Description of Artificial Sequence: Synthetic polynucleotide
  source 1..642: mol_type = other DNA
gaaatagtgatgacgcagtctccagccaccctgtctgtgtctccaggggaaagagccaccctctcctgcagggccagtcagagtgttagcagcaacttagcctggtaccagcagaaacctggccaggctcccaggctcctcatctatggtgcagccaccagggccactggtatcccagccaggttcagtggcagtgggtctgggacagagttcactctcaccatcagcagcctggagcctgaagattttgcagtttattactgtcagcagtataataacttccctctcactttcggcggagggaccaaggtggagatcaaacgaacggtggctgcaccatctgtcttcatcttcccgccatctgatgagcagttgaaatctggaactgcctctgttgtgtgcctgctgaataacttctatcccagagaggccaaagtacagtggaaggtggataacgccctccaatcgggtaactcccaggagagtgtcacagagcaggacagcaaggacagcacctacagcctcagcagcaccctgacgctgagcaaagcagactacgagaaacacaaagtctacgcctgcgaagtcacccatcagggcctgagctcgcccgtcacaaagagcttcaacaggggagagtgt

SEQ ID NO: 1960 - DNA, 642 bp, synthetic construct
  misc_feature 1..642: note = Description of Artificial Sequence: Synthetic polynucleotide
  source 1..642: mol_type = other DNA
gaaatagtgatgacgcagtctccagccaccctgtctgtgtctccaggggaaagagccaccctctcctgcagggccagtcagagtgttagcagcaacttagcctggtaccagcagaaacctggccaggctcccaggctcctcatctatggtgcagccaccagggccactggtatcccagccaggttcagtggcagtgggtctgggacagagttcactctcaccatcagcagcctggagcctgaagattttgcagtttattactgtcagcagtataataactatcctctcactttcggcggagggaccaaggtggagatcaaacgaacggtggctgcaccatctgtcttcatcttcccgccatctgatgagcagttgaaatctggaactgcctctgttgtgtgcctgctgaataacttctatcccagagaggccaaagtacagtggaaggtggataacgccctccaatcgggtaactcccaggagagtgtcacagagcaggacagcaaggacagcacctacagcctcagcagcaccctgacgctgagcaaagcagactacgagaaacacaaagtctacgcctgcgaagtcacccatcagggcctgagctcgcccgtcacaaagagcttcaacaggggagagtgt

SEQ ID NO: 1961 - DNA, 642 bp, synthetic construct
  misc_feature 1..642: note = Description of Artificial Sequence: Synthetic polynucleotide
  source 1..642: mol_type = other DNA
gaaatagtgatgacgcagtctccagccaccctgtctgtgtctccaggggaaagagccaccctctcctgcagggccagtcagagtgttagcagcaacttagcctggtaccagcagaaacctggccaggctcccaggctcctcatctatggtgcagccaccagggccactggtatcccagccaggttcagtggcagtgggtctgggacagagttcactctcaccatcagcagcctggagcctgaagattttgcagtttattactgtcagcagtataataactggcctctcactttcggcggagggaccaaggtggagatcaaacgaacggtggctgcaccatctgtcttcatcttcccgccatctgatgagcagttgaaatctggaactgcctctgttgtgtgcctgctgaataacttctatcccagagaggccaaagtacagtggaaggtggataacgccctccaatcgggtaactcccaggagagtgtcacagagcaggacagcaaggacagcacctacagcctcagcagcaccctgacgctgagcaaagcagactacgagaaacacaaagtctacgcctgcgaagtcacccatcagggcctgagctcgcccgtcacaaagagcttcaacaggggagagtgt

SEQ ID NO: 1962 - DNA, 642 bp, synthetic construct; identical to SEQ ID NO: 1961
  misc_feature 1..642: note = Description of Artificial Sequence: Synthetic polynucleotide
  source 1..642: mol_type = other DNA

SEQ ID NO: 1963 - DNA, 645 bp, synthetic construct
  misc_feature 1..645: note = Description of Artificial Sequence: Synthetic polynucleotide
  source 1..645: mol_type = other DNA
gaaattgtgttgacgcagtctccaggcaccctgtctttgtctccaggggaaagagccaccctctcctgcagggccagtcagagtattagttacagttacttagcctggtaccagcagaaacctggccaggctccccggctcctcatctatggtgcatccagcagggccactggcatcccagacaggttcagtggcagtgggtctgggacagacttcactctcaccatcagcagactggagcctgatgattttgcagtgtattactgtcagcagtatggtagttcaccgctcactttcggcggagggaccaaggtggagatcaaacgaacggtggctgcaccatctgtcttcatcttcccgccatctgatgagcagttgaaatctggaactgcctctgttgtgtgcctgctgaataacttctatcccagagaggccaaagtacagtggaaggtggataacgccctccaatcgggtaactcccaggagagtgtcacagagcaggacagcaaggacagcacctacagcctcagcagcaccctgacgctgagcaaagcagactacgagaaacacaaagtctacgcctgcgaagtcacccatcagggcctgagctcgcccgtcacaaagagcttcaacaggggagagtgt

SEQ ID NO: 1964 - DNA, 645 bp, synthetic construct; identical to SEQ ID NO: 1893
  misc_feature 1..645: note = Description of Artificial Sequence: Synthetic polynucleotide
  source 1..645: mol_type = other DNA

SEQ ID NO: 1965 - DNA, 645 bp, synthetic construct; identical to SEQ ID NO: 1963
  misc_feature 1..645: note = Description of Artificial Sequence: Synthetic polynucleotide
  source 1..645: mol_type = other DNA

SEQ ID NO: 1966 - DNA, 645 bp, synthetic construct; identical to SEQ ID NO: 1963
  misc_feature 1..645: note = Description of Artificial Sequence: Synthetic polynucleotide
  source 1..645: mol_type = other DNA

SEQ ID NO: 1967 - DNA, 645 bp, synthetic construct; identical to SEQ ID NO: 1963
  misc_feature 1..645: note = Description of Artificial Sequence: Synthetic polynucleotide
  source 1..645: mol_type = other DNA

SEQ ID NO: 1968 - DNA, 645 bp, synthetic construct; identical to SEQ ID NO: 1893
  misc_feature 1..645: note = Description of Artificial Sequence: Synthetic polynucleotide
  source 1..645: mol_type = other DNA

SEQ ID NO: 1969 - DNA, 645 bp, synthetic construct; identical to SEQ ID NO: 1893
  misc_feature 1..645: note = Description of Artificial Sequence: Synthetic polynucleotide
  source 1..645: mol_type = other DNA

SEQ ID NO: 1970 - DNA, 660 bp, synthetic construct; identical to SEQ ID NO: 1889
  misc_feature 1..660: note = Description of Artificial Sequence: Synthetic polynucleotide
  source 1..660: mol_type = other DNA

SEQ ID NO: 1971 - DNA, 660 bp, synthetic construct; identical to SEQ ID NO: 1889
  misc_feature 1..660: note = Description of Artificial Sequence: Synthetic polynucleotide
  source 1..660: mol_type = other DNA

SEQ ID NO: 1972 - DNA, 660 bp, synthetic construct; identical to SEQ ID NO: 1889
  misc_feature 1..660: note = Description of Artificial Sequence: Synthetic polynucleotide
  source 1..660: mol_type = other DNA

SEQ ID NO: 1973 - DNA, 660 bp, synthetic construct; identical to SEQ ID NO: 1889
  misc_feature 1..660: note = Description of Artificial Sequence: Synthetic polynucleotide
  source 1..660: mol_type = other DNA

SEQ ID NO: 1974 - DNA, 660 bp, synthetic construct; identical to SEQ ID NO: 1889
  misc_feature 1..660: note = Description of Artificial Sequence: Synthetic polynucleotide
  source 1..660: mol_type = other DNA

SEQ ID NO: 1975 - DNA, 660 bp, synthetic construct; identical to SEQ ID NO: 1889
  misc_feature 1..660: note = Description of Artificial Sequence: Synthetic polynucleotide
  source 1..660: mol_type = other DNA

SEQ ID NO: 1976 - DNA, 660 bp, synthetic construct; identical to SEQ ID NO: 1889
  misc_feature 1..660: note = Description of Artificial Sequence: Synthetic polynucleotide
  source 1..660: mol_type = other DNA

SEQ ID NO: 1977 - DNA, 660 bp, synthetic construct; identical to SEQ ID NO: 1889
  misc_feature 1..660: note = Description of Artificial Sequence: Synthetic polynucleotide
  source 1..660: mol_type = other DNA

SEQ ID NO: 1978 - DNA, 660 bp, synthetic construct; identical to SEQ ID NO: 1889
  misc_feature 1..660: note = Description of Artificial Sequence: Synthetic polynucleotide
  source 1..660: mol_type = other DNA

SEQ ID NO: 1979 - DNA, 660 bp, synthetic construct
  misc_feature 1..660: note = Description of Artificial Sequence: Synthetic polynucleotide
  source 1..660: mol_type = other DNA
gacatcgtgatgacccagtctccagactccctggctgtgtctctgggcgagagggccaccatcaactgcaagtccagccagagtgttttatccagctccaacaataagaactacatagcttggtaccagcagaaaccaggacaacctcctaagctgctcatttactgggcatctacccgggaatccggggtccctgaccgattcagtggcagcgggtctgggacagatttcactctcaccatcagcagcctgcaggctgaagatgtggcagttttttactgtcaacaatattatagtactccgtggacgttcggccaagggaccaaggtggaaatcaaacgaacggtggctgcaccatctgtcttcatcttcccgccatctgatgagcagttgaaatctggaactgcctctgttgtgtgcctgctgaataacttctatcccagagaggccaaagtacagtggaaggtggataacgccctccaatcgggtaactcccaggagagtgtcacagagcaggacagcaaggacagcacctacagcctcagcagcaccctgacgctgagcaaagcagactacgagaaacacaaagtctacgcctgcgaagtcacccatcagggcctgagctcgcccgtcacaaagagcttcaacaggggagagtgt

SEQ ID NO: 1980 - DNA, 660 bp, synthetic construct; identical to SEQ ID NO: 1979
  misc_feature 1..660: note = Description of Artificial Sequence: Synthetic polynucleotide
  source 1..660: mol_type = other DNA

SEQ ID NO: 1981 - DNA, 660 bp, synthetic construct
  misc_feature 1..660: note = Description of Artificial Sequence: Synthetic polynucleotide
  source 1..660: mol_type = other DNA
gacatcgtgatgacccagtctccagactccctgtctgtgtctctgggcgagagggccaccatcaactgcaagtccagccagagtgttttatccagctccaacaataagaactacttagcttggtaccaacagaaaccaggacagcctcctaacctgctcatttactggacttctacccgagaatccggggtccctgaccgattcagtggcagcgggtctgggacagatttcactctcaccatcaacagcctgcaggctgaagatgtggctgtttattactgtcagcaatattatcgtactccgtggacgttcggccaagggaccaaggtggaaatcaaacgaacggtggctgcaccatctgtcttcatcttcccgccatctgatgagcagttgaaatctggaactgcctctgttgtgtgcctgctgaataacttctatcccagagaggccaaagtacagtggaaggtggataacgccctccaatcgggtaactcccaggagagtgtcacagagcaggacagcaaggacagcacctacagcctcagcagcaccctgacgctgagcaaagcagactacgagaaacacaaagtctacgcctgcgaagtcacccatcagggcctgagctcgcccgtcacaaagagcttcaacaggggagagtgt

SEQ ID NO: 1982 - DNA, 660 bp, synthetic construct; identical to SEQ ID NO: 1981
  misc_feature 1..660: note = Description of Artificial Sequence: Synthetic polynucleotide
  source 1..660: mol_type = other DNA

SEQ ID NO: 1983 - DNA, 660 bp, synthetic construct; identical to SEQ ID NO: 1891
  misc_feature 1..660: note = Description of Artificial Sequence: Synthetic polynucleotide
  source 1..660: mol_type = other DNA

SEQ ID NO: 1984 - DNA, 660 bp, synthetic construct; identical to SEQ ID NO: 1981
  misc_feature 1..660: note = Description of Artificial Sequence: Synthetic polynucleotide
  source 1..660: mol_type = other DNA

SEQ ID NO: 1985 - DNA, 660 bp, synthetic construct; identical to SEQ ID NO: 1981
  misc_feature 1..660: note = Description of Artificial Sequence: Synthetic polynucleotide
  source 1..660: mol_type = other DNA

SEQ ID NO: 1986 - DNA, 660 bp, synthetic construct; identical to SEQ ID NO: 1891
  misc_feature 1..660: note = Description of Artificial Sequence: Synthetic polynucleotide
  source 1..660: mol_type = other DNA

SEQ ID NO: 1987 - DNA, 660 bp, synthetic construct; identical to SEQ ID NO: 1891
  misc_feature 1..660: note = Description of Artificial Sequence: Synthetic polynucleotide
  source 1..660: mol_type = other DNA

SEQ ID NO: 1988 - DNA, 660 bp, synthetic construct
  misc_feature 1..660: note = Description of Artificial Sequence: Synthetic polynucleotide
  source 1..660: mol_type = other DNA
gacatcgtgatgacccagtctccagactccctggctgtgtctctgggcgagagggccaccatcaactgcaagtccagccagagtgttttatccagctccaacaataagaactacttagcttggtaccaacagaaaccaggacagcctcctaaactgctcatttactggacttctacccgagaatccggggtccctgaccgattcagtggcagcgggtctgggacagatttcactctcaccatcaacagcctgcaggctgaagatgtggctgtttattactgtcagcaatattatcgtactccgtggacgttcggccaagggaccaaggtggaaatcaaacgaacggtggctgcaccatctgtcttcatcttcccgccatctgatgagcagttgaaatctggaactgcctctgttgtgtgcctgctgaataacttctatcccagagaggccaaagtacagtggaaggtggataacgccctccaatcgggtaactcccaggagagtgtcacagagcaggacagcaaggacagcacctacagcctcagcagcaccctgacgctgagcaaagcagactacgagaaacacaaagtctacgcctgcgaagtcacccatcagggcctgagctcgcccgtcacaaagagcttcaacaggggagagtgt

SEQ ID NO: 1989 - DNA, 660 bp, synthetic construct; identical to SEQ ID NO: 1981
  misc_feature 1..660: note = Description of Artificial Sequence: Synthetic polynucleotide
  source 1..660: mol_type = other DNA

SEQ ID NO: 1990 - DNA, 660 bp, synthetic construct; identical to SEQ ID NO: 1890
  misc_feature 1..660: note = Description of Artificial Sequence: Synthetic polynucleotide
  source 1..660: mol_type = other DNA

SEQ ID NO: 1991 - DNA, 660 bp, synthetic construct; identical to SEQ ID NO: 1890
  misc_feature 1..660: note = Description of Artificial Sequence: Synthetic polynucleotide
  source 1..660: mol_type = other DNA

SEQ ID NO: 1992 - DNA, 660 bp, synthetic construct; identical to SEQ ID NO: 1890
  misc_feature 1..660: note = Description of Artificial Sequence: Synthetic polynucleotide
  source 1..660: mol_type = other DNA

SEQ ID NO: 1993 - DNA, 660 bp, synthetic construct; identical to SEQ ID NO: 1979
  misc_feature 1..660: note = Description of Artificial Sequence: Synthetic polynucleotide
  source 1..660: mol_type = other DNA

SEQ ID NO: 1994 - DNA, 660 bp, synthetic construct; identical to SEQ ID NO: 1979
  misc_feature 1..660: note = Description of Artificial Sequence: Synthetic polynucleotide
  source 1..660: mol_type = other DNA

SEQ ID NO: 1995 - DNA, 660 bp, synthetic construct; identical to SEQ ID NO: 1892
  misc_feature 1..660: note = Description of Artificial Sequence: Synthetic polynucleotide
  source 1..660: mol_type = other DNA

SEQ ID NO: 1996 - DNA, 660 bp, synthetic construct; identical to SEQ ID NO: 1892
  misc_feature 1..660: note = Description of Artificial Sequence: Synthetic polynucleotide
  source 1..660: mol_type = other DNA

SEQ ID NO: 1997 - DNA, 660 bp, synthetic construct; identical to SEQ ID NO: 1892
  misc_feature 1..660: note = Description of Artificial Sequence: Synthetic polynucleotide
  source 1..660: mol_type = other DNA

SEQ ID NO: 1998 - DNA, 660 bp, synthetic construct; identical to SEQ ID NO: 1892
  misc_feature 1..660: note = Description of Artificial Sequence: Synthetic polynucleotide
  source 1..660: mol_type = other DNA

SEQ ID NO: 1999 - DNA, 660 bp, synthetic construct; identical to SEQ ID NO: 1892
  misc_feature 1..660: note = Description of Artificial Sequence: Synthetic polynucleotide
  source 1..660: mol_type = other DNA

SEQ ID NO: 2000 - DNA, 660 bp, synthetic construct; identical to SEQ ID NO: 1892
  misc_feature 1..660: note = Description of Artificial Sequence: Synthetic polynucleotide
  source 1..660: mol_type = other DNA

SEQ ID NO: 2001 - DNA, 660 bp, synthetic construct; identical to SEQ ID NO: 1892
  misc_feature 1..660: note = Description of Artificial Sequence: Synthetic polynucleotide
  source 1..660: mol_type = other DNA

SEQ ID NO: 2002 - DNA, 660 bp, synthetic construct
  misc_feature 1..660: note = Description of Artificial Sequence: Synthetic polynucleotide
  source 1..660: mol_type = other DNA
gacatcgtgatgacccagtctccagactccctgtctgtgtctctgggcgagagggccaccatcaactgcaagtccagccagagtgttttatccagctccaacaataagaactacttagcttggtaccagcagaaaccaggacagcctcctaacctgctcatttactggacttctacccgagaatccggggtccctgaccgattcagtggcagcgggtctgggacagatttcactctcaccatcaacagcctgcaggctgaagatgtggctgtttattactgtcagcaatattatcgtactccgtggacgttcggccaagggaccaaggtggaaatcaaacgaacggtggctgcaccatctgtcttcatcttcccgccatctgatgagcagttgaaatctggaactgcctctgttgtgtgcctgctgaataacttctatcccagagaggccaaagtacagtggaaggtggataacgccctccaatcgggtaactcccaggagagtgtcacagagcaggacagcaaggacagcacctacagcctcagcagcaccctgacgctgagcaaagcagactacgagaaacacaaagtctacgcctgcgaagtcacccatcagggcctgagctcgcccgtcacaaagagcttcaacaggggagagtgt

SEQ ID NO: 2003 - DNA, 660 bp, synthetic construct; identical to SEQ ID NO: 2002
  misc_feature 1..660: note = Description of Artificial Sequence: Synthetic polynucleotide
  source 1..660: mol_type = other DNA

SEQ ID NO: 2004 - DNA, 660 bp, synthetic construct; identical to SEQ ID NO: 2002
  misc_feature 1..660: note = Description of Artificial Sequence: Synthetic polynucleotide
  source 1..660: mol_type = other DNA

SEQ ID NO: 2005 - DNA, 660 bp, synthetic construct; identical to SEQ ID NO: 2002
  misc_feature 1..660: note = Description of Artificial Sequence: Synthetic polynucleotide
  source 1..660: mol_type = other DNA

SEQ ID NO: 2006 - DNA, 660 bp, synthetic construct
  misc_feature 1..660: note = Description of Artificial Sequence: Synthetic polynucleotide
  source 1..660: mol_type = other DNA
gacatcgtgatgacccagtctccagactccctggctgtgtctctgggcgagagggccaccatcaactgcaagtccagccagagtgttttatccagctccaacaataagaactacttagcttggtaccagcagaaaccaggacagcctcctaaactgctcatttactggacttctacccgagattccggggtccctgaccgattcagtggcagcgggtctgggacagatttcactctcaccatcaacagcctgcaggctgaagatgtggctgtttattactgtcagcaatattatcgtactccgtggacgttcggccaagggaccaaggtggaaatcaaacgaacggtggctgcaccatctgtcttcatcttcccgccatctgatgagcagttgaaatctggaactgcctctgttgtgtgcctgctgaataacttctatcccagagaggccaaagtacagtggaaggtggataacgccctccaatcgggtaactcccaggagagtgtcacagagcaggacagcaaggacagcacctacagcctcagcagcaccctgacgctgagcaaagcagactacgagaaacacaaagtctacgcctgcgaagtcacccatcagggcctgagctcgcccgtcacaaagagcttcaacaggggagagtgt

SEQ ID NO: 2007 - DNA, 660 bp, synthetic construct
  misc_feature 1..660: note = Description of Artificial Sequence: Synthetic polynucleotide
  source 1..660: mol_type = other DNA
gacatcgtgatgacccagtctccagactccctggctgtgtctctgggcgagagggccaccatcaactgcaagtccagccagagtgttttatccagctccaacaataagaactacttagcttggtaccagcagaaaccaggacagcctcctaaactgctcatttactggacttctacccgagaatccggggtccctgaccgattcagtggcagcgggtctgggacagatttcactctcaccatcaacagcctgcaggctgaagatgtggctgtttattactgtcagcaatattatcgtactccgtggacgttcggccaagggaccaaggtggaaatcaaacgaacggtggctgcaccatctgtcttcatcttcccgccatctgatgagcagttgaaatctggaactgcctctgttgtgtgcctgctgaataacttctatcccagagaggccaaagtacagtggaaggtggataacgccctccaatcgggtaactcccaggagagtgtcacagagcaggacagcaaggacagcacctacagcctcagcagcaccctgacgctgagcaaagcagactacgagaaacacaaagtctacgcctgcgaagtcacccatcagggcctgagctcgcccgtcacaaagagcttcaacaggggagagtgt

SEQ ID NO: 2008 - DNA, 648 bp, synthetic construct
  misc_feature 1..648: note = Description of Artificial Sequence: Synthetic polynucleotide
  source 1..648: mol_type = other DNA
cagtctgtgctgactcagccaccctcagcgtctgggacccccgggcagagggtcaccatctcttgttctggaagtagctccaacatcggaagtcaaactgtaaactggtaccagcacctcccaggaacggcccccaaactcctcatctatactaataatcagcggccctcaggggtccctgaccgattctctggctccaagtctggcacctcagcctcccttgccatcagtgggctccagtctgaggatgaggctgattatttctgtgcaacattcgatgaaagcctgagtggtccggtattcggcggagggaccaagctgaccgtcctaggtcagcccaaggctgccccctcggtcactctgttcccgccctcctctgaggagcttcaagccaacaaggccacactggtgtgtctcataagtgacttctacccgggagccgtgacagtggcctggaaggcagatagcagccccgtcaaggcgggagtggagaccaccacaccctccaaacaaagcaacaacaagtacgcggccagcagctatctgagcctgacgcctgagcagtggaagtcccacagaagctacagctgccaggtcacgcatgaagggagcaccgtggagaagacagtggcccctacagaatgttca

SEQ ID NO: 2009 - DNA, 648 bp, synthetic construct
  misc_feature 1..648: note = Description of Artificial Sequence: Synthetic polynucleotide
  source 1..648: mol_type = other DNA
cagtctgtgctgactcagccaccctcagcgtctgggacccccgggcagagggtcaccatctcttgttctggaagtagctccaacatcggaagtcaaactgtaaactggtaccagcacctcccaggaacggcccccaaactcctcatctatactaataatcagcggccctcaggggtccctgaccgattctctggctccaagtctggcacctcagcctcccttgccatcagtgggctccagtctgaggatgaggctgattatttctgtgcaacattcgatgaaagcctgcaaggtccggtattcggcggagggaccaagctgaccgtcctaggtcagcccaaggctgccccctcggtcactctgttcccgccctcctctgaggagcttcaagccaacaaggccacactggtgtgtctcataagtgacttctacccgggagccgtgacagtggcctggaaggcagatagcagccccgtcaaggcgggagtggagaccaccacaccctccaaacaaagcaacaacaagtacgcggccagcagctatctgagcctgacgcctgagcagtggaagtcccacagaagctacagctgccaggtcacgcatgaagggagcaccgtggagaagacagtggcccctacagaatgttca

SEQ ID NO: 2010 - DNA, 648 bp, synthetic construct
  misc_feature 1..648: note = Description of Artificial Sequence: Synthetic polynucleotide
  source 1..648: mol_type = other DNA
cagtctgtgctgactcagccaccctcagcgtctgggacccccgggcagagggtcaccatctcttgttctggaagtagctccaacatcggaagtaattatgtaaactggtaccagcacctcccaggaacggcccccaaactcctcatctatactaataatcagcggccctcaggggtccctgaccgattctctggctccaagtctggcacctcagcctcccttgccatcagtgggctccagtctgaggatgaggctgattatttctgtgcaacattcgatgaaagcctgagtggtccggtattcggcggagggaccaagctgaccgtcctaggtcagcccaaggctgccccctcggtcactctgttcccgccctcctctgaggagcttcaagccaacaaggccacactggtgtgtctcataagtgacttctacccgggagccgtgacagtggcctggaaggcagatagcagccccgtcaaggcgggagtggagaccaccacaccctccaaacaaagcaacaacaagtacgcggccagcagctatctgagcctgacgcctgagcagtggaagtcccacagaagctacagctgccaggtcacgcatgaagggagcaccgtggagaagacagtggcccctacagaatgttca

SEQ ID NO: 2011 - DNA, 648 bp, synthetic construct
  misc_feature 1..648: note = Description of Artificial Sequence: Synthetic polynucleotide
  source 1..648: mol_type = other DNA
cagtctgtgctgactcagccaccctcagcgtctgggacccccgggcagagggtcaccatctcttgttctggaagtagctccaacatcggaagtaattatgtaaactggtaccagcacctcccaggaacggcccccaaactcctcatctatactaataatcagcggccctcaggggtccctgaccgattctctggctccaagtctggcacctcagcctcccttgccatcagtgggctccagtctgaggatgaggctgattatttctgtgcaacattcgatgaaagcctgcaaggtccggtattcggcggagggaccaagctgaccgtcctaggtcagcccaaggctgccccctcggtcactctgttcccgccctcctctgaggagcttcaagccaacaaggccacactggtgtgtctcataagtgacttctacccgggagccgtgacagtggcctggaaggcagatagcagccccgtcaaggcgggagtggagaccaccacaccctccaaacaaagcaacaacaagtacgcggccagcagctatctgagcctgacgcctgagcagtggaagtcccacagaagctacagctgccaggtcacgcatgaagggagcaccgtggagaagacagtggcccctacagaatgttca

SEQ ID NO: 2012 - DNA, 648 bp, synthetic construct
  misc_feature 1..648: note = Description of Artificial Sequence: Synthetic polynucleotide
  source 1..648: mol_type = other DNA
cagtctgtgctgactcagccaccctcagcgtctgggacccccgggcagagggtcaccatctcttgttctggaagtagctccaacatcggaagtcaaactgtaaactggtaccagcacctcccaggaacggcccccaaactcctcatctatactaataatcagcggccctcaggggtccctgaccgattctctggctccaagtctggcacctcagcctcccttgccatcagtgggctccagtctgaggatgaggctgattatttctgtgcaacattcgatgacagcctgaatggtccggtattcggcggagggaccaagctgaccgtcctaggtcagcccaaggctgccccctcggtcactctgttcccgccctcctctgaggagcttcaagccaacaaggccacactggtgtgtctcataagtgacttctacccgggagccgtgacagtggcctggaaggcagatagcagccccgtcaaggcgggagtggagaccaccacaccctccaaacaaagcaacaacaagtacgcggccagcagctatctgagcctgacgcctgagcagtggaagtcccacagaagctacagctgccaggtcacgcatgaagggagcaccgtggagaagacagtggcccctacagaatgttca

SEQ ID NO: 2013 - DNA, 648 bp, synthetic construct
  misc_feature 1..648: note = Description of Artificial Sequence: Synthetic polynucleotide
  source 1..648: mol_type = other DNA
cagtctgtgctgactcagccaccctcagcgtctgggacccccgggcagagggtcaccatctcttgttctggaagtagctccaacatcggaagtaattatgtaaactggtaccagcacctcccaggaacggcccccaaactcctcatctatactaataatcagcggccctcaggggtccctgaccgattctctggctccaagtctggcacctcagcctcccttgccatcagtgggctccagtctgaggatgaggctgattatttctgtgcaacattcgatgacagcctgaatggtccggtattcggcggagggaccaagctgaccgtcctaggtcagcccaaggctgccccctcggtcactctgttcccgccctcctctgaggagcttcaagccaacaaggccacactggtgtgtctcataagtgacttctacccgggagccgtgacagtggcctggaaggcagatagcagccccgtcaaggcgggagtggagaccaccacaccctccaaacaaagcaacaacaagtacgcggccagcagctatctgagcctgacgcctgagcagtggaagtcccacagaagctacagctgccaggtcacgcatgaagggagcaccgtggagaagacagtggcccctacagaatgttca

SEQ ID NO: 2014 - DNA, 648 bp, synthetic construct
  misc_feature 1..648: note = Description of Artificial Sequence: Synthetic polynucleotide
  source 1..648: mol_type = other DNA
cagtctgtgctgactcagccaccctcagcgtctgggacccccgggcagagggtcaccatctcttgttctggaagtagctccaacatcggaagtaatactgtaaactggtaccagcacctcccaggaacggcccccaaactcctcatctatactaataatcagcggccctcaggggtccctgaccgattctctggctccaagtctggcacctcagcctcccttgccatcagtgggctccagtctgaggatgaggctgattatttctgtgcaacattcgatgaaagcctgaatggtccggtattcggcggagggaccaagctgaccgtcctaggtcagcccaaggctgccccctcggtcactctgttcccgccctcctctgaggagcttcaagccaacaaggccacactggtgtgtctcataagtgacttctacccgggagccgtgacagtggcctggaaggcagatagcagccccgtcaaggcgggagtggagaccaccacaccctccaaacaaagcaacaacaagtacgcggccagcagctatctgagcctgacgcctgagcagtggaagtcccacagaagctacagctgccaggtcacgcatgaagggagcaccgtggagaagacagtggcccctacagaatgttca

SEQ ID NO: 2015 - DNA, 648 bp, synthetic construct
  misc_feature 1..648: note = Description of Artificial Sequence: Synthetic polynucleotide
  source 1..648: mol_type = other DNA
cagtctgtgctgactcagccaccctcagcgtctgggacccccgggcagagggtcaccatctcttgttctggaagtagctccaacatcggaagtaatactgtaaactggtaccagcacctcccaggaacggcccccaaactcctcatctatactaataatcagcggccctcaggggtccctgaccgattctctggctccaagtctggcacctcagcctcccttgccatcagtgggctccagtctgaggatgaggctgattatttctgtgcaacattcgatgacagcctgcaaggtccggtattcggcggagggaccaagctgaccgtcctaggtcagcccaaggctgccccctcggtcactctgttcccgccctcctctgaggagcttcaagccaacaaggccacactggtgtgtctcataagtgacttctacccgggagccgtgacagtggcctggaaggcagatagcagccccgtcaaggcgggagtggagaccaccacaccctccaaacaaagcaacaacaagtacgcggccagcagctatctgagcctgacgcctgagcagtggaagtcccacagaagctacagctgccaggtcacgcatgaagggagcaccgtggagaagacagtggcccctacagaatgttca

SEQ ID NO: 2016 - DNA, 648 bp, synthetic construct
  misc_feature 1..648: note = Description of Artificial Sequence: Synthetic polynucleotide
  source 1..648: mol_type = other DNA
cagtctgtgctgactcagccaccctcagcgtctgggacccccgggcagagggtcaccatctcttgttctggaagtagctccaacatcggaagtaatactgtaaactggtaccagcacctcccaggaacggcccccaaactcctcatctatactaataatcagcggccctcaggggtccctgaccgattctctggctccaagtctggcacctcagcctcccttgccatcagtgggctccagtctgaggatgaggctgattatttctgtgcaacattcgatgacagcctgagtggtccggtattcggcggagggaccaagctgaccgtcctaggtcagcccaaggctgccccctcggtcactctgttcccgccctcctctgaggagcttcaagccaacaaggccacactggtgtgtctcataagtgacttctacccgggagccgtgacagtggcctggaaggcagatagcagccccgtcaaggcgggagtggagaccaccacaccctccaaacaaagcaacaacaagtacgcggccagcagctatctgagcctgacgcctgagcagtggaagtcccacagaagctacagctgccaggtcacgcatgaagggagcaccgtggagaagacagtggcccctacagaatgttca

SEQ ID NO: 2017 - DNA, 648 bp, synthetic construct
  misc_feature 1..648: note = Description of Artificial Sequence: Synthetic polynucleotide
  source 1..648: mol_type = other DNA
cagtctgtgctgactcagccaccctcagcgtctgggacccccgggcagagggtcaccatctcttgttctggaagtagctccaacatcggaagtaatactgtaaactggtaccagcacctcccaggaacggcccccaaactcctcatctatactaataatcagcggccctcaggggtccctgaccgattctctggctccaagtctggcacctcagcctcccttgccatcagtgggctccagtctgaggatgaggctgattatttctgtgcaacattcgatgacagcctgaatgctccggtattcggcggagggaccaagctgaccgtcctaggtcagcccaaggctgccccctcggtcactctgttcccgccctcctctgaggagcttcaagccaacaaggccacactggtgtgtctcataagtgacttctacccgggagccgtgacagtggcctggaaggcagatagcagccccgtcaaggcgggagtggagaccaccacaccctccaaacaaagcaacaacaagtacgcggccagcagctatctgagcctgacgcctgagcagtggaagtcccacagaagctacagctgccaggtcacgcatgaagggagcaccgtggagaagacagtggcccctacagaatgttca

SEQ ID NO: 2018 - DNA, 648 bp, synthetic construct
  misc_feature 1..648: note = Description of Artificial Sequence: Synthetic polynucleotide
  source 1..648: mol_type = other DNA
cagtctgtgctgactcagccaccctcagcgtctgggacccccgggcagagggtcaccatctcttgttctggaagtagctccaacatcggaagtaatactgtaaactggtaccagcacctcccaggaacggcccccaaactcctcatctatactaataatcagcggccctcaggggtccctgaccgattctctggctccaagtctggcacctcagcctcccttgccatcagtgggctccagtctgaggatgaggctgattatttctgtgcaacattcgatagcagcctgaatggtccggtattcggcggagggaccaagctgaccgtcctaggtcagcccaaggctgccccctcggtcactctgttcccgccctcctctgaggagcttcaagccaacaaggccacactggtgtgtctcataagtgacttctacccgggagccgtgacagtggcctggaaggcagatagcagccccgtcaaggcgggagtggagaccaccacaccctccaaacaaagcaacaacaagtacgcggccagcagctatctgagcctgacgcctgagcagtggaagtcccacagaagctacagctgccaggtcacgcatgaagggagcaccgtggagaagacagtggcccctacagaatgttca

SEQ ID NO: 2019 - DNA, 648 bp, synthetic construct
  misc_feature 1..648: note = Description of Artificial Sequence: Synthetic polynucleotide
  source 1..648: mol_type = other DNA
cagtctgtgctgactcagccaccctcagcgtctgggacccccgggcagagggtcaccatctcttgttctggaagtagctccaacatcggaagtaattatgtaaactggtaccagcacctcccaggaacggcccccaaactcctcatctatactaataatcagcggccctcaggggtccctgaccgattctctggctccaagtctggcacctcagcctcccttgccatcagtgggctccagtctgaggatgaggctgattatttctgtgcaacattcgatagcagcctgaatgctccggtattcggcggagggaccaagctgaccgtcctaggtcagcccaaggctgccccctcggtcactctgttcccgccctcctctgaggagcttcaagccaacaaggccacactggtgtgtctcataagtgacttctacccgggagccgtgacagtggcctggaaggcagatagcagccccgtcaaggcgggagtggagaccaccacaccctccaaacaaagcaacaacaagtacgcggccagcagctatctgagcctgacgcctgagcagtggaagtcccacagaagctacagctgccaggtcacgcatgaagggagcaccgtggagaagacagtggcccctacagaatgttca

SEQ ID NO: 2020 - DNA, 648 bp, synthetic construct; identical to SEQ ID NO: 2019
  misc_feature 1..648: note = Description of Artificial Sequence: Synthetic polynucleotide
  source 1..648: mol_type = other DNA

SEQ ID NO: 2021 - DNA, 648 bp, synthetic construct; identical to SEQ ID NO: 2008
  misc_feature 1..648: note = Description of Artificial Sequence: Synthetic polynucleotide
  source 1..648: mol_type = other DNA

SEQ ID NO: 2022 - DNA, 642 bp, synthetic construct
  misc_feature 1..642: note = Description of Artificial Sequence: Synthetic polynucleotide
  source 1..642: mol_type = other DNA
gacatccagatgacccagtctccatcctccctgtctgcatctataggagacagagtcaccatcacttgccgggcaagtcaggaccttagaaattatttaggctggtatcaacagaaaccagggaaagcccctaagcgcctgatctatggtgcatccagtttgcaaagtggggtcccttcaaggttcagcggcagtggatctgggacagaattcactctcacaatcagcagcctgcagcctgaagatttcgcaacttattactgtctacagcataataattaccccttcactttcggccaagggaccaaagtggatatcaaacgaacggtggctgcaccatctgtcttcatcttcccgccatctgatgagcagttgaaatctggaactgcctctgttgtgtgcctgctgaataacttctatcccagagaggccaaagtacagtggaaggtggataacgccctccaatcgggtaactcccaggagagtgtcacagagcaggacagcaaggacagcacctacagcctcagcagcaccctgacgctgagcaaagcagactacgagaaacacaaagtctacgcctgcgaagtcacccatcagggcctgagctcgcccgtcacaaagagcttcaacaggggagagtgt

SEQ ID NO: 2023 - DNA, 642 bp, synthetic construct; identical to SEQ ID NO: 1906
  misc_feature 1..642: note = Description of Artificial Sequence: Synthetic polynucleotide
  source 1..642: mol_type = other DNA

SEQ ID NO: 2024 - DNA, 648 bp, synthetic construct
  misc_feature 1..648: note = Description of Artificial Sequence: Synthetic polynucleotide
  source 1..648: mol_type = other DNA
cagtctgtgctgactcagccaccctcagcgtctgggacccccgggcagagggtcaccatctcttgttctggaagtagctccaacatcggaagtaatactgtaaactggtaccagcaactcccaggaacggcccccaaactcctcatctatactaataatcagcggccctcaggggtccctgaccgattctctggctccaagtctggcacctcagcctcccttgccatcagtgggctccagtctgaggatgaggctgattatttctgtgcaacattcgatagcagcctgagtggtccggtattcggcggagggaccaagctgaccgtcctaggtcagcccaaggctgccccctcggtcactctgttcccgccctcctctgaggagcttcaagccaacaaggccacactggtgtgtctcataagtgacttctacccgggagccgtgacagtggcctggaaggcagatagcagccccgtcaaggcgggagtggagaccaccacaccctccaaacaaagcaacaacaagtacgcggccagcagctatctgagcctgacgcctgagcagtggaagtcccacagaagctacagctgccaggtcacgcatgaagggagcaccgtggagaagacagtggcccctacagaatgttca

SEQ ID NO: 2025 - DNA, 642 bp, synthetic construct
  misc_feature 1..642: note = Description of Artificial Sequence: Synthetic polynucleotide
  source 1..642: mol_type = other DNA
gacatccagctgacccagtctccatcctccctgtctgcatctgtaggagacagagtcactatcacttgccgggcaagtcagaccattagcaggtttttaaattggtatcagcagaaacctgggaaagcccctgagctcctgatctatgttgcatccagtttgcaaagtggggtcccatcaagattcagtggcagtggttctgggacagatttcactctcaccatcagcagtctgcaacctgaagattttgcaacttactactgtcaacagagttacagtaccctgatcagttttggccaggggaccaagctggagatcacacgaacggtggctgcaccatctgtcttcatcttcccgccatctgatgagcagttgaaatctggaactgcctctgttgtgtgcctgctgaataacttctatcccagagaggccaaagtacagtggaaggtggataacgccctccaatcgggtaactcccaggagagtgtcacagagcaggacagcaaggacagcacctacagcctcagcagcaccctgacgctgagcaaagcagactacgagaaacacaaagtctacgcctgcgaagtcacccatcagggcctgagctcgcccgtcacaaagagcttcaacaggggagagtgt

SEQ ID NO: 2026 - DNA, 648 bp, synthetic construct
  misc_feature 1..648: note = Description of Artificial Sequence: Synthetic polynucleotide
  source 1..648: mol_type = other DNA
cagtctgtgttgacgcagccgccctcagtgtctgcggccccaggacagaaggtcaccatctcctgctctggaagcagctccaacattggaaataattatgtatcctggtatgagcagttcccaggaacagcccccaaactcctcatttatgacaataataagcgaccctcagggattcctgaccgattctctggctccaagtctggcacgtcagccaccctgggcatcaccggactccagactggggacgaggccgattattactgcggaacatgggatagcagcctgagtgctgtggtattcggcggagggaccaaactgaccgtcctaggtcagcccaaggctgccccctcggtcactctgttcccgccctcctctgaggagcttcaagccaacaaggccacactggtgtgtctcataagtgacttctacccgggagccgtgacagtggcctggaaggcagatagcagccccgtcaaggcgggagtggagaccaccacaccctccaaacaaagcaacaacaagtacgcggccagcagctatctgagcctgacgcctgagcagtggaagtcccacagaagctacagctgccaggtcacgcatgaagggagcaccgtggagaagacagtggcccctacagaatgttca

SEQ ID NO: 2027 - DNA, 642 bp, synthetic construct
  misc_feature 1..642: note = Description of Artificial Sequence: Synthetic polynucleotide
  source 1..642: mol_type = other DNA
gacatccagctgacccagtctccatcctccctgtctgcatctgtaggagacagagtcactatcacttgccgggcaagtcagaccattagcaggtttttaaattggtatcagcagaaacctgggaaagcccctgagctcctgatctatgttgcatccagtttgcaaagtggggtcccatcaagattcagtggcagtggttctgggacagatttcactctcaccatcagcagtctgcaacctgaagattttgcaacttactactgtcaacagagttacagtaccctgatcagttttggccaggggaccaagctggagatcaaacgaacggtggctgcaccatctgtcttcatcttcccgccatctgatgagcagttgaaatctggaactgcctctgttgtgtgcctgctgaataacttctatcccagagaggccaaagtacagtggaaggtggataacgccctccaatcgggtaactcccaggagagtgtcacagagcaggacagcaaggacagcacctacagcctcagcagcaccctgacgctgagcaaagcagactacgagaaacacaaagtctacgcctgcgaagtcacccatcagggcctgagctcgcccgtcacaaagagcttcaacaggggagagtgt

SEQ ID NO: 2028 - DNA, 642 bp, synthetic construct; identical to SEQ ID NO: 2027
  misc_feature 1..642: note = Description of Artificial Sequence: Synthetic polynucleotide
  source 1..642: mol_type = other DNA

SEQ ID NO: 2029 - DNA, 642 bp, synthetic construct; identical to SEQ ID NO: 2025
  misc_feature 1..642: note = Description of Artificial Sequence: Synthetic polynucleotide
  source 1..642: mol_type = other DNA

SEQ ID NO: 2030 - DNA, 642 bp, synthetic construct
  misc_feature 1..642: note = Description of Artificial Sequence: Synthetic polynucleotide
  source 1..642: mol_type = other DNA
gacatccagctgacccagtctccatcctccctgtctgcatctgtaggagacagagtcactatcacttgccgggcaagtcagaccattagcaggtttttaaattggtatcagcagaaacctgggaaagcccctaagctcctgatctatgttgcatccagtttgcaaagtggggtcccatcaagattcagtggcagtggttctgggacagatttcactctcaccatcagcagtctgcaacctgaagattttgcaacttactactgtcaacagagttacagtaccctgatcagttttggccaggggaccaagctggagatcaaacgaacggtggctgcaccatctgtcttcatcttcccgccatctgatgagcagttgaaatctggaactgcctctgttgtgtgcctgctgaataacttctatcccagagaggccaaagtacagtggaaggtggataacgccctccaatcgggtaactcccaggagagtgtcacagagcaggacagcaaggacagcacctacagcctcagcagcaccctgacgctgagcaaagcagactacgagaaacacaaagtctacgcctgcgaagtcacccatcagggcctgagctcgcccgtcacaaagagcttcaacaggggagagtgt

SEQ ID NO: 2031 - DNA, 642 bp, synthetic construct; identical to SEQ ID NO: 2027
  misc_feature 1..642: note = Description of Artificial Sequence: Synthetic polynucleotide
  source 1..642: mol_type = other DNA

SEQ ID NO: 2032 - DNA, 642 bp, synthetic construct; identical to SEQ ID NO: 2027
  misc_feature 1..642: note = Description of Artificial Sequence: Synthetic polynucleotide
  source 1..642: mol_type = other DNA

SEQ ID NO: 2033 - DNA, 648 bp, synthetic construct
  misc_feature 1..648: note = Description of Artificial Sequence: Synthetic polynucleotide
  source 1..648: mol_type = other DNA
cagtctgtgttgacgcagccgccctcagtgtctgcggccccaggacagaaggtcaccatctcctgctctggaagcagctccaacattggaaataattatgtatcctggtatcagcagctcccaggaacagcccccaaactcctcatttatgacaataataagcgaccctcagggattcctgaccgattctctggctccaagtctggcacgtcagccaccctgggcatcaccggactccagactggggacgaggccgattattactgcggaacatgggatagcagcctgagtgctgtggtattcggcggagggaccaaactgaccgtcctaggtcagcccaaggctgccccctcggtcactctgttcccgccctcctctgaggagcttcaagccaacaaggccacactggtgtgtctcataagtgacttctacccgggagccgtgacagtggcctggaaggcagatagcagccccgtcaaggcgggagtggagaccaccacaccctccaaacaaagcaacaacaagtacgcggccagcagctatctgagcctgacgcctgagcagtggaagtcccacagaagctacagctgccaggtcacgcatgaagggagcaccgtggagaagacagtggcccctacagaatgttca

SEQ ID NO: 2034 - DNA, 648 bp, synthetic construct; identical to SEQ ID NO: 2033
  misc_feature 1..648: note = Description of Artificial Sequence: Synthetic polynucleotide
  source 1..648: mol_type = other DNA

SEQ ID NO: 2035 - DNA, 648 bp, synthetic construct; identical to SEQ ID NO: 2026
  misc_feature 1..648: note = Description of Artificial Sequence: Synthetic polynucleotide
  source 1..648: mol_type = other DNA

SEQ ID NO: 2036 - DNA, 648 bp, synthetic construct
  misc_feature 1..648: note = Description of Artificial Sequence: Synthetic polynucleotide
  source 1..648: mol_type = other DNA
cagtctgtgttgacgcagccgccctcagtgtctgcggccccaggacagaaggtcaccatctcctgctctggaagcagctccaacattggaaataattatgtatcctggtatcagcagctcccaggaacagcccccaaactcctcatttatgacaataataagcgaccctcagggattcctgaccgattctctggctccaagtctggcacgtcagccaccctggccatcaccggactccagactggggacgaggccgattattactgcggaacattcgaaagcagcctgagtgctgtggtattcggcggagggaccaaactgaccgtcctaggtcagcccaaggctgccccctcggtcactctgttcccgccctcctctgaggagcttcaagccaacaaggccacactggtgtgtctcataagtgacttctacccgggagccgtgacagtggcctggaaggcagatagcagccccgtcaaggcgggagtggagaccaccacaccctccaaacaaagcaacaacaagtacgcggccagcagctatctgagcctgacgcctgagcagtggaagtcccacagaagctacagctgccaggtcacgcatgaagggagcaccgtggagaagacagtggcccctacagaatgttca

SEQ ID NO: 2037 - DNA, 648 bp, synthetic construct
  misc_feature 1..648: note = Description of Artificial Sequence: Synthetic polynucleotide
  source 1..648: mol_type = other DNA
cagtctgtgttgacgcagccgccctcagtgtctgcggccccaggacagaaggtcaccatctcctgctctggaagcagctccaacattggaaataattatgtatcctggtatcagcagctcccaggaacagcccccaaactcctcatttatgacaataataagcgaccctcagggattcctgaccgattctctggctccaagtctggcacgtcagccaccctggccatcaccggactccagactggggacgaggccgattattactgcggaacatgggatagcagcctgagtgctgtggtattcggcggagggaccaaactgaccgtcctaggtcagcccaaggctgccccctcggtcactctgttcccgccctcctctgaggagcttcaagccaacaaggccacactggtgtgtctcataagtgacttctacccgggagccgtgacagtggcctggaaggcagatagcagccccgtcaaggcgggagtggagaccaccacaccctccaaacaaagcaacaacaagtacgcggccagcagctatctgagcctgacgcctgagcagtggaagtcccacagaagctacagctgccaggtcacgcatgaagggagcaccgtggagaagacagtggcccctacagaatgttca

SEQ ID NO: 2038 - DNA, 648 bp, synthetic construct; identical to SEQ ID NO: 2037
  misc_feature 1..648: note = Description of Artificial Sequence: Synthetic polynucleotide
  source 1..648: mol_type = other DNA

SEQ ID NO: 2039 - DNA, 648 bp, synthetic construct; identical to SEQ ID NO: 2033
  misc_feature 1..648: note = Description of Artificial Sequence: Synthetic polynucleotide
  source 1..648: mol_type = other DNA

SEQ ID NO: 2040 - DNA, 648 bp, synthetic construct; identical to SEQ ID NO: 2036
  misc_feature 1..648: note = Description of Artificial Sequence: Synthetic polynucleotide
  source 1..648: mol_type = other DNA

SEQ ID NO: 2041 - DNA, 642 bp, synthetic construct
  misc_feature 1..642: note = Description of Artificial Sequence: Synthetic polynucleotide
  source 1..642: mol_type = other DNA
gacatccagctgacccagtctccatcctccctgtctgcatctgtaggagacagagtcactatcacttgccgggcaagtcagaccattagcaggtttttaaattggtatcagcagaaacctgggaaagcccctaagctcctgatctatgttgcatccagtttgcaaagtggggtcccatcaagattcagtggcagtggttctgggacagatttcactctcaccatcagcagtctgcaacctgaagattttgcaacttactactgtcaacagagttacagtaccctgctcagttttggccaggggaccaagctggagatcaaacgaacggtggctgcaccatctgtcttcatcttcccgccatctgatgagcagttgaaatctggaactgcctctgttgtgtgcctgctgaataacttctatcccagagaggccaaagtacagtggaaggtggataacgccctccaatcgggtaactcccaggagagtgtcacagagcaggacagcaaggacagcacctacagcctcagcagcaccctgacgctgagcaaagcagactacgagaaacacaaagtctacgcctgcgaagtcacccatcagggcctgagctcgcccgtcacaaagagcttcaacaggggagagtgt

SEQ ID NO: 2042 - DNA, 1374 bp, synthetic construct
  misc_feature 1..1374: note = Description of Artificial Sequence: Synthetic polynucleotide
  source 1..1374: mol_type = other DNA
cagatgcaggtggtgcagtctggggctgaggtgaagaagcctggggcctcagtgaaggtctcctgcaaggcttccggatacaccttcaccggctactatatgcattgggtgcgacaggcccctggacaagggcttgagtggatgggatggatcaaccctaacagtggtggcacaaactatgcacagaagtttcagggcagggtcaccatgaccagggacacgtccatcagtacagcctacatggagctgagcaggctgaggtctgacgacacggccgtgtattactgtgcgagagggggggattacgtttgggggacttatcggcctcactactactacggtatggacgtctggggccaagggaccacggtcaccgtctcctcagcctccaccaagggcccatcggtcttccccctggcaccctcctccaagagcacctctgggggcacagcggccctgggctgcctggtcaaggactacttccccgaaccggtgacggtgtcgtggaactcaggcgccctgaccagcggcgtgcacaccttcccggctgtcctacagtcctcaggactctactccctcagcagcgtggtgaccgtgccctccagcagcttgggcacccagacctacatctgcaacgtgaatcacaagcccagcaacaccaaggtggacaagaaagttgagcccaaatcttgtgacaaaactcacacatgcccaccgtgcccagcacctgaactcctggggggaccgtcagtcttcctcttccccccaaaacccaaggacaccctcatgatctcccggacccctgaggtcacatgcgtggtggtggacgtgagccacgaagaccctgaggtcaagttcaactggtacgtggacggcgtggaggtgcataatgccaagacaaagccgtgtgaggagcagtacggcagcacgtaccgttgtgtcagcgtcctcaccgtcctgcaccaggactggctgaatggcaaggagtacaagtgcaaggtctccaacaaagccctcccagcccccatcgagaaaaccatctccaaagccaaagggcagccccgagaaccacaggtgtacaccctgcccccatcccgggaggagatgaccaagaaccaggtcagcctgacctgcctggtcaaaggcttctatcccagcgacatcgccgtggagtgggagagcaatgggcagccggagaacaactacaagaccacgcctcccgtgctggactccgacggctccttcttcctctatagcaagctcaccgtggacaagagcaggtggcagcaggggaacgtcttctcatgctccgtgatgcatgaggctctgcacaaccactacacgcagaagagcctctccctgtctccgggtaaa

SEQ ID NO: 2043 - DNA, 1353 bp, synthetic construct
  misc_feature 1..1353: note = Description of Artificial Sequence: Synthetic polynucleotide
  source 1..1353: mol_type = other DNA
caggtgcagctggtggagtctgggggaggcgtggtccagcctgggaggtccctgagactctcctgtgcagcgtctggattcactttcagtaactttggcatgcactgggtccgccaggctccaggcaaggggctggagtgggtggcagttatatggtatgatggaagtaatgaaaactatgcagactccgtgaagggccgattcaccatctccagagacaattccaagaatacgctgtatctgcacatgaacagcctgagagtcgcggacacggctgtgtattattgtgcgcgagatgggacgatctttggagtggtcttgggggactactggggccagggaaccctggtcaccgtctcctcagcctccaccaagggcccatcggtcttccccctggcaccctcctccaagagcacctctgggggcacagcggccctgggctgcctggtcaaggactacttccccgaaccggtgacggtgtcgtggaactcaggcgccctgaccagcggcgtgcacaccttcccggctgtcctacagtcctcaggactctactccctcagcagcgtggtgaccgtgccctccagcagcttgggcacccagacctacatctgcaacgtgaatcacaagcccagcaacaccaaggtggacaagaaagttgagcccaaatcttgtgacaaaactcacacatgcccaccgtgcccagcacctgaactcctggggggaccgtcagtcttcctcttccccccaaaacccaaggacaccctcatgatctcccggacccctgaggtcacatgcgtggtggtggacgtgagccacgaagaccctgaggtcaagttcaactggtacgtggacggcgtggaggtgcataatgccaagacaaagccgtgtgaggagcagtacggcagcacgtaccgttgtgtcagcgtcctcaccgtcctgcaccaggactggctgaatggcaaggagtacaagtgcaaggtctccaacaaagccctcccagcccccatcgagaaaaccatctccaaagccaaagggcagccccgagaaccacaggtgtacaccctgcccccatcccgggaggagatgaccaagaaccaggtcagcctgacctgcctggtcaaaggcttctatcccagcgacatcgccgtggagtgggagagcaatgggcagccggagaacaactacaagaccacgcctcccgtgctggactccgacggctccttcttcctctatagcaagctcaccgtggacaagagcaggtggcagcaggggaacgtcttctcatgctccgtgatgcatgaggctctgcacaaccactacacgcagaagagcctctccctgtctccgggtaaa

SEQ ID NO: 2044 - DNA, 1353 bp, synthetic construct
  misc_feature 1..1353: note = Description of Artificial Sequence: Synthetic polynucleotide
  source 1..1353: mol_type = other DNA
caggtgcagctggtggagtctgggggaggcgtggtccagcctgggaggtccctgagactctcctgtgcagcgtctggattcaccttcagttactttggcatgcactgggtccgccaggctccaggcaaggggctggagtgggtggcagttatatggtatgatggaagtaataaatactatgcagactccgtgaagggccgcttcaccatctccagagacaattccaagaacacgctgtatctgcaaatgaacagcctgagagccgaggacacggctgtgtattactgtgcgcgagatgggacgatttttggagtgctcttgggggactactggggccagggaaccctggtcaccgtctcctcagcctccaccaagggcccatcggtcttccccctggcaccctcctccaagagcacctctgggggcacagcggccctgggctgcctggtcaaggactacttccccgaaccggtgacggtgtcgtggaactcaggcgccctgaccagcggcgtgcacaccttcccggctgtcctacagtcctcaggactctactccctcagcagcgtggtgaccgtgccctccagcagcttgggcacccagacctacatctgcaacgtgaatcacaagcccagcaacaccaaggtggacaagaaagttgagcccaaatcttgtgacaaaactcacacatgcccaccgtgcccagcacctgaactcctggggggaccgtcagtcttcctcttccccccaaaacccaaggacaccctcatgatctcccggacccctgaggtcacatgcgtggtggtggacgtgagccacgaagaccctgaggtcaagttcaactggtacgtggacggcgtggaggtgcataatgccaagacaaagccgtgtgaggagcagtacggcagcacgtaccgttgtgtcagcgtcctcaccgtcctgcaccaggactggctgaatggcaaggagtacaagtgcaaggtctccaacaaagccctcccagcccccatcgagaaaaccatctccaaagccaaagggcagccccgagaaccacaggtgtacaccctgcccccatcccgggaggagatgaccaagaaccaggtcagcctgacctgcctggtcaaaggcttctatcccagcgacatcgccgtggagtgggagagcaatgggcagccggagaacaactacaagaccacgcctcccgtgctggactccgacggctccttcttcctctatagcaagctcaccgtggacaagagcaggtggcagcaggggaacgtcttctcatgctccgtgatgcatgaggctctgcacaaccactacacgcagaagagcctctccctgtctccgggtaaa

SEQ ID NO: 2045 - DNA, 1350 bp, synthetic construct
  misc_feature 1..1350: note = Description of Artificial Sequence: Synthetic polynucleotide
  source 1..1350: mol_type = other DNA
caggtgcaactggtggagtctgggggaggcgtggtccagcctgggaggtccctgagactctcctgtgcagcgtctggattcaccttcagtagctatggcatgcactgggtccgccaggctccaggcaaggggctggagtgggtggcagttatatggtatgatggaagtaataaatactatgcagactccgtgaagggccgattcaccatctccagcgacaattccaagaacacgctgtatctgcaaatgaacagcctgagagccgaggacacggctgtgtattactgtgcgagagataggacgatttttggagtggttcttgactactggggccagggaaccctggtcaccgtctcctcagcctccaccaagggcccatcggtcttccccctggcaccctcctccaagagcacctctgggggcacagcggccctgggctgcctggtcaaggactacttccccgaaccggtgacggtgtcgtggaactcaggcgccctgaccagcggcgtgcacaccttcccggctgtcctacagtcctcaggactctactccctcagcagcgtggtgaccgtgccctccagcagcttgggcacccagacctacatctgcaacgtgaatcacaagcccagcaacaccaaggtggacaagaaagttgagcccaaatcttgtgacaaaactcacacatgcccaccgtgcccagcacctgaactcctggggggaccgtcagtcttcctcttccccccaaaacccaaggacaccctcatgatctcccggacccctgaggtcacatgcgtggtggtggacgtgagccacgaagaccctgaggtcaagttcaactggtacgtggacggcgtggaggtgcataatgccaagacaaagccgtgtgaggagcagtacggcagcacgtaccgttgtgtcagcgtcctcaccgtcctgcaccaggactggctgaatggcaaggagtacaagtgcaaggtctccaacaaagccctcccagcccccatcgagaaaaccatctccaaagccaaagggcagccccgagaaccacaggtgtacaccctgcccccatcccgggaggagatgaccaagaaccaggtcagcctgacctgcctggtcaaaggcttctatcccagcgacatcgccgtggagtgggagagcaatgggcagccggagaacaactacaagaccacgcctcccgtgctggactccgacggctccttcttcctctatagcaagctcaccgtggacaagagcaggtggcagcaggggaacgtcttctcatgctccgtgatgcatgaggctctgcacaaccactacacgcagaagagcctctccctgtctccgggtaaa

SEQ ID NO: 2046 - DNA, 1359 bp, synthetic construct
  misc_feature 1..1359: note = Description of Artificial Sequence: Synthetic polynucleotide
  source 1..1359: mol_type = other DNA
caggtgccgctggtgcagtctggggctgaggtgaagaagcctggggcctcagtgaaggtctcctgcaaggcttctggatacaccttcaccggctactatatccactgggtgcgacaggcccctggacaagggcttgagtggatggggtggatcaaccctgacagtggtggcacagactattcacagaggtttcagggcaggttcaccatgaccagggacacgtccatcagcacagcctacatggaactgaacaggctgagatctgacgacacggccgtgtattactgtgcgagagaggccacgatttttggaatggttattgtaccgtttgactactggggccagggaaccctggtcaccgtctcctcagcctccaccaagggcccatcggtcttccccctggcaccctcctccaagagcacctctgggggcacagcggccctgggctgcctggtcaaggactacttccccgaaccggtgacggtgtcgtggaactcaggcgccctgaccagcggcgtgcacaccttcccggctgtcctacagtcctcaggactctactccctcagcagcgtggtgaccgtgccctccagcagcttgggcacccagacctacatctgcaacgtgaatcacaagcccagcaacaccaaggtggacaagaaagttgagcccaaatcttgtgacaaaactcacacatgcccaccgtgcccagcacctgaactcctggggggaccgtcagtcttcctcttccccccaaaacccaaggacaccctcatgatctcccggacccctgaggtcacatgcgtggtggtggacgtgagccacgaagaccctgaggtcaagttcaactggtacgtggacggcgtggaggtgcataatgccaagacaaagccgtgtgaggagcagtacggcagcacgtaccgttgtgtcagcgtcctcaccgtcctgcaccaggactggctgaatggcaaggagtacaagtgcaaggtctccaacaaagccctcccagcccccatcgagaaaaccatctccaaagccaaagggcagccccgagaaccacaggtgtacaccctgcccccatcccgggaggagatgaccaagaaccaggtcagcctgacctgcctggtcaaaggcttctatcccagcgacatcgccgtggagtgggagagcaatgggcagccggagaacaactacaagaccacgcctcccgtgctggactccgacggctccttcttcctctatagcaagctcaccgtggacaagagcaggtggcagcaggggaacgtcttctcatgctccgtgatgcatgaggctctgcacaaccactacacgcagaagagcctctccctgtctccgggtaaa

SEQ ID NO: 2047 - DNA, 1359 bp, synthetic construct
  misc_feature 1..1359: note = Description of Artificial Sequence: Synthetic polynucleotide
  source 1..1359: mol_type = other DNA
caggtgccgctggtgcagtctggggctgaggtgaagaagcctggggcctcagtgaaggtctcctgcaaggcttctggatacaccttcaccggctactatatccactgggtgcgacaggcccctggacaaggacttgagtggatggggtggatcaaccctgacagtggtggcacagactattcacagaggtttcagggcaggttcaccatgaccagggacacgtccatcagcacagcctacatggaactgagcaggctgagatctgacgacacggccgtgtattactgtgcgagagaggccacgatttttggaatggttattgtaccgtttgactactggggccagggaaccctggtcaccgtctcctcagcctccaccaagggcccatcggtcttccccctggcaccctcctccaagagcacctctgggggcacagcggccctgggctgcctggtcaaggactacttccccgaaccggtgacggtgtcgtggaactcaggcgccctgaccagcggcgtgcacaccttcccggctgtcctacagtcctcaggactctactccctcagcagcgtggtgaccgtgccctccagcagcttgggcacccagacctacatctgcaacgtgaatcacaagcccagcaacaccaaggtggacaagaaagttgagcccaaatcttgtgacaaaactcacacatgcccaccgtgcccagcacctgaactcctggggggaccgtcagtcttcctcttccccccaaaacccaaggacaccctcatgatctcccggacccctgaggtcacatgcgtggtggtggacgtgagccacgaagaccctgaggtcaagttcaactggtacgtggacggcgtggaggtgcataatgccaagacaaagccgtgtgaggagcagtacggcagcacgtaccgttgtgtcagcgtcctcaccgtcctgcaccaggactggctgaatggcaaggagtacaagtgcaaggtctccaacaaagccctcccagcccccatcgagaaaaccatctccaaagccaaagggcagccccgagaaccacaggtgtacaccctgcccccatcccgggaggagatgaccaagaaccaggtcagcctgacctgcctggtcaaaggcttctatcccagcgacatcgccgtggagtgggagagcaatgggcagccggagaacaactacaagaccacgcctcccgtgctggactccgacggctccttcttcctctatagcaagctcaccgtggacaagagcaggtggcagcaggggaacgtcttctcatgctccgtgatgcatgaggctctgcacaaccactacacgcagaagagcctctccctgtctccgggtaaa

SEQ ID NO: 2048 - DNA, 1359 bp, synthetic construct
  misc_feature 1..1359: note = Description of Artificial Sequence: Synthetic polynucleotide
  source 1..1359: mol_type = other DNA
caggtgccgctggtacagtctggggctgaggtgaagaagcctggggcctcagtgaaggtctcctgcaaggcttctggatacaccttcaccggctactatatacactgggtgcgtcaggcccctggacaagggcttgtgtggatggggtggatcagccctaacagtggtgacacaagctatgcacagaagtttcaggacagggtcaccatgaccagggacacgtccatcagcacagcctatatggagctgagcagactgagatctgacgacacggccgtgtatttctgtacgagagaggccacgatttttggaatgcttattgtaccatttgactactggggccagggaaccctggtcaccgtctcctcagcctccaccaagggcccatcggtcttccccctggcaccctcctccaagagcacctctgggggcacagcggccctgggctgcctggtcaaggactacttccccgaaccggtgacggtgtcgtggaactcaggcgccctgaccagcggcgtgcacaccttcccggctgtcctacagtcctcaggactctactccctcagcagcgtggtgaccgtgccctccagcagcttgggcacccagacctacatctgcaacgtgaatcacaagcccagcaacaccaaggtggacaagaaagttgagcccaaatcttgtgacaaaactcacacatgcccaccgtgcccagcacctgaactcctggggggaccgtcagtcttcctcttccccccaaaacccaaggacaccctcatgatctcccggacccctgaggtcacatgcgtggtggtggacgtgagccacgaagaccctgaggtcaagttcaactggtacgtggacggcgtggaggtgcataatgccaagacaaagccgtgtgaggagcagtacggcagcacgtaccgttgtgtcagcgtcctcaccgtcctgcaccaggactggctgaatggcaaggagtacaagtgcaaggtctccaacaaagccctcccagcccccatcgagaaaaccatctccaaagccaaagggcagccccgagaaccacaggtgtacaccctgcccccatcccgggaggagatgaccaagaaccaggtcagcctgacctgcctggtcaaaggcttctatcccagcgacatcgccgtggagtgggagagcaatgggcagccggagaacaactacaagaccacgcctcccgtgctggactccgacggctccttcttcctctatagcaagctcaccgtggacaagagcaggtggcagcaggggaacgtcttctcatgctccgtgatgcatgaggctctgcacaaccactacacgcagaagagcctctccctgtctccgggtaaa

SEQ ID NO: 2049 - DNA, 1359 bp, synthetic construct
  misc_feature 1..1359: note = Description of Artificial Sequence: Synthetic polynucleotide
  source 1..1359: mol_type = other DNA
caggtgccgctggtgcagtctggggctgaggtgaagaagcctggggcctcagtgaaggtctcctgcaaggcttctggatacaccttcaccggctactatatacactgggtgcgtcaggcccctggacaagggcttgagtggatggggtggataagccctaacaatggtgacacaaactatgcacagaagtttcaggacagggtcaccatgaccagggacacgtccatcagcacagcctatatggagctgagcaggctgagatctgacgacacggccgtgtattactgtacgagagaggccacgatttttggaatgcttattgtaccatttgactactggggccagggaaccctggtcaccgtctcctcagcctccaccaagggcccatcggtcttccccctggcaccctcctccaagagcacctctgggggcacagcggccctgggctgcctggtcaaggactacttccccgaaccggtgacggtgtcgtggaactcaggcgccctgaccagcggcgtgcacaccttcccggctgtcctacagtcctcaggactctactccctcagcagcgtggtgaccgtgccctccagcagcttgggcacccagacctacatctgcaacgtgaatcacaagcccagcaacaccaaggtggacaagaaagttgagcccaaatcttgtgacaaaactcacacatgcccaccgtgcccagcacctgaactcctggggggaccgtcagtcttcctcttccccccaaaacccaaggacaccctcatgatctcccggacccctgaggtcacatgcgtggtggtggacgtgagccacgaagaccctgaggtcaagttcaactggtacgtggacggcgtggaggtgcataatgccaagacaaagccgtgtgaggagcagtacggcagcacgtaccgttgtgtcagcgtcctcaccgtcctgcaccaggactggctgaatggcaaggagtacaagtgcaaggtctccaacaaagccctcccagcccccatcgagaaaaccatctccaaagccaaagggcagccccgagaaccacaggtgtacaccctgcccccatcccgggaggagatgaccaagaaccaggtcagcctgacctgcctggtcaaaggcttctatcccagcgacatcgccgtggagtgggagagcaatgggcagccggagaacaactacaagaccacgcctcccgtgctggactccgacggctccttcttcctctatagcaagctcaccgtggacaagagcaggtggcagcaggggaacgtcttctcatgctccgtgatgcatgaggctctgcacaaccactacacgcagaagagcctctccctgtctccgggtaaa

SEQ ID NO: 2050 - DNA, 1368 bp, synthetic construct
  misc_feature 1..1368: note = Description of Artificial Sequence: Synthetic polynucleotide
  source 1..1368: mol_type = other DNA
caggtgcagttgcaggagtcgggcccaggactggtgaagccttcacagaccctgtccctcacctgcactgtctctggtgactccatcagcagtggtggttactactggagctggatccgccagcacccagggaagggcctggagtggattgggtacatctattacagtgggagcacctactacaacccgtccctcaagagtcgagttaccatatcagtagacacgtctaagaaccagttctccctgaagctgagctctgtgactgccgcggacacggccgtgtattactgtgcgagagatcgtattacgatttttggagtggttatggggggcggtatggacgtctggggccaagggaccacggtcaccgtctcctcagcctccaccaagggcccatcggtcttccccctggcaccctcctccaagagcacctctgggggcacagcggccctgggctgcctggtcaaggactacttccccgaaccggtgacggtgtcgtggaactcaggcgccctgaccagcggcgtgcacaccttcccggctgtcctacagtcctcaggactctactccctcagcagcgtggtgaccgtgccctccagcagcttgggcacccagacctacatctgcaacgtgaatcacaagcccagcaacaccaaggtggacaagaaagttgagcccaaatcttgtgacaaaactcacacatgcccaccgtgcccagcacctgaactcctggggggaccgtcagtcttcctcttccccccaaaacccaaggacaccctcatgatctcccggacccctgaggtcacatgcgtggtggtggacgtgagccacgaagaccctgaggtcaagttcaactggtacgtggacggcgtggaggtgcataatgccaagacaaagccgtgtgaggagcagtacggcagcacgtaccgttgtgtcagcgtcctcaccgtcctgcaccaggactggctgaatggcaaggagtacaagtgcaaggtctccaacaaagccctcccagcccccatcgagaaaaccatctccaaagccaaagggcagccccgagaaccacaggtgtacaccctgcccccatcccgggaggagatgaccaagaaccaggtcagcctgacctgcctggtcaaaggcttctatcccagcgacatcgccgtggagtgggagagcaatgggcagccggagaacaactacaagaccacgcctcccgtgctggactccgacggctccttcttcctctatagcaagctcaccgtggacaagagcaggtggcagcaggggaacgtcttctcatgctccgtgatgcatgaggctctgcacaaccactacacgcagaagagcctctccctgtctccgggtaaa

SEQ ID NO: 2051 - DNA, 1350 bp, synthetic construct
  misc_feature 1..1350: note = Description of Artificial Sequence: Synthetic polynucleotide
  source 1..1350: mol_type = other DNA
caggtgcagctggtggagtctgggggaggcgtggtccagcctgggaggtccctgagactctcctgtgcagcatctggattcaccttcagtaactatggcatgcactgggtccgccaggctccaggcgaggggctggagtgggtggcagctatatggtttgatggaagtgataaatactatgcagactccgtgaagggccgattcaccatctccagagacaactccaagaacacgctgtatctgcaaatgaacagcctgagagccgaggacacggctgtgtattactgtgcgagagatcaggcgatttttggagtggtccccgactactggggccagggaaccctggtcaccgtctcctcagcctccaccaagggcccatcggtcttccccctggcaccctcctccaagagcacctctgggggcacagcggccctgggctgcctggtcaaggactacttccccgaaccggtgacggtgtcgtggaactcaggcgccctgaccagcggcgtgcacaccttcccggctgtcctacagtcctcaggactctactccctcagcagcgtggtgaccgtgccctccagcagcttgggcacccagacctacatctgcaacgtgaatcacaagcccagcaacaccaaggtggacaagaaagttgagcccaaatcttgtgacaaaactcacacatgcccaccgtgcccagcacctgaactcctggggggaccgtcagtcttcctcttccccccaaaacccaaggacaccctcatgatctcccggacccctgaggtcacatgcgtggtggtggacgtgagccacgaagaccctgaggtcaagttcaactggtacgtggacggcgtggaggtgcataatgccaagacaaagccgtgtgaggagcagtacggcagcacgtaccgttgtgtcagcgtcctcaccgtcctgcaccaggactggctgaatggcaaggagtacaagtgcaaggtctccaacaaagccctcccagcccccatcgagaaaaccatctccaaagccaaagggcagccccgagaaccacaggtgtacaccctgcccccatcccgggaggagatgaccaagaaccaggtcagcctgacctgcctggtcaaaggcttctatcccagcgacatcgccgtggagtgggagagcaatgggcagccggagaacaactacaagaccacgcctcccgtgctggactccgacggctccttcttcctctatagcaagctcaccgtggacaagagcaggtggcagcaggggaacgtcttctcatgctccgtgatgcatgaggctctgcacaaccactacacgcagaagagcctctccctgtctccgggtaaa

SEQ ID NO: 2052 - DNA, 1353 bp, synthetic construct; identical to SEQ ID NO: 2044
  misc_feature 1..1353: note = Description of Artificial Sequence: Synthetic polynucleotide
  source 1..1353: mol_type = other DNA

SEQ ID NO: 2053 - DNA, 1350 bp, synthetic construct
  misc_feature 1..1350: note = Description of Artificial Sequence: Synthetic polynucleotide
  source 1..1350: mol_type = other DNA
caggtgcagctggtggagtctgggggaggcgtggtccagcctgggaggtccctgagactctcctgtgcagcgtctggattctccttcagtagctatggcatgcactgggtccgccagcctccaggcaaggggctggagtgggtggcagctatatggtatgatggaaataataaatactatgcagactccgtgaagggccgattcaccatctccagagacagttccaagaacacgctgtatctgcaaatgaacagcctgagagccgaggacacggctgtgtattactgtgcgagagatcggacgatttttggagtggtccttgagtacctcggccagggaaccctggtcaccgtctcctcagcctccaccaagggcccatcggtcttccccctggcaccctcctccaagagcacctctgggggcacagcggccctgggctgcctggtcaaggactacttccccgaaccggtgacggtgtcgtggaactcaggcgccctgaccagcggcgtgcacaccttcccggctgtcctacagtcctcaggactctactccctcagcagcgtggtgaccgtgccctccagcagcttgggcacccagacctacatctgcaacgtgaatcacaagcccagcaacaccaaggtggacaagaaagttgagcccaaatcttgtgacaaaactcacacatgcccaccgtgcccagcacctgaactcctggggggaccgtcagtcttcctcttccccccaaaacccaaggacaccctcatgatctcccggacccctgaggtcacatgcgtggtggtggacgtgagccacgaagaccctgaggtcaagttcaactggtacgtggacggcgtggaggtgcataatgccaagacaaagccgtgtgaggagcagtacggcagcacgtaccgttgtgtcagcgtcctcaccgtcctgcaccaggactggctgaatggcaaggagtacaagtgcaaggtctccaacaaagccctcccagcccccatcgagaaaaccatctccaaagccaaagggcagccccgagaaccacaggtgtacaccctgcccccatcccgggaggagatgaccaagaaccaggtcagcctgacctgcctggtcaaaggcttctatcccagcgacatcgccgtggagtgggagagcaatgggcagccggagaacaactacaagaccacgcctcccgtgctggactccgacggctccttcttcctctatagcaagctcaccgtggacaagagcaggtggcagcaggggaacgtcttctcatgctccgtgatgcatgaggctctgcacaaccactacacgcagaagagcctctccctgtctccgggtaaa

SEQ ID NO: 2054 - DNA, 1341 bp, synthetic construct
  misc_feature 1..1341: note = Description of Artificial Sequence: Synthetic polynucleotide
  source 1..1341: mol_type = other DNA
caggtgcagctgcaggagtcgggcccaggactggtgaagccttcggagaccctgtccctcacctgcactgtctctcagggctccatcagtagttactactggagctggatccggcagcccgccgggaagggactagagtggattggccgtatctataccagtgggagcaccaactacaacccctccctcaagagtcgagtcaccatgtcaatagacacgtccaagaaccagttctccctgaaactgaactctgtgaccgccgcggacacggccgtgtattactgtgcgagagatgtagcagtggctggctttgactactggggccagggaaccctggtcaccgtctcctcagcctccaccaagggcccatcggtcttccccctggcaccctcctccaagagcacctctgggggcacagcggccctgggctgcctggtcaaggactacttccccgaaccggtgacggtgtcgtggaactcaggcgccctgaccagcggcgtgcacaccttcccggctgtcctacagtcctcaggactctactccctcagcagcgtggtgaccgtgccctccagcagcttgggcacccagacctacatctgcaacgtgaatcacaagcccagcaacaccaaggtggacaagaaagttgagcccaaatcttgtgacaaaactcacacatgcccaccgtgcccagcacctgaactcctggggggaccgtcagtcttcctcttccccccaaaacccaaggacaccctcatgatctcccggacccctgaggtcacatgcgtggtggtggacgtgagccacgaagaccctgaggtcaagttcaactggtacgtggacggcgtggaggtgcataatgccaagacaaagccgtgtgaggagcagtacggcagcacgtaccgttgtgtcagcgtcctcaccgtcctgcaccaggactggctgaatggcaaggagtacaagtgcaaggtctccaacaaagccctcccagcccccatcgagaaaaccatctccaaagccaaagggcagccccgagaaccacaggtgtacaccctgcccccatcccgggaggagatgaccaagaaccaggtcagcctgacctgcctggtcaaaggcttctatcccagcgacatcgccgtggagtgggagagcaatgggcagccggagaacaactacaagaccacgcctcccgtgctggactccgacggctccttcttcctctatagcaagctcaccgtggacaagagcaggtggcagcaggggaacgtcttctcatgctccgtgatgcatgaggctctgcacaaccactacacgcagaagagcctctccctgtctccgggtaaa

SEQ ID NO: 2055 - DNA, 1341 bp, synthetic construct
  misc_feature 1..1341: note = Description of Artificial Sequence: Synthetic polynucleotide
  source 1..1341: mol_type = other DNA
caggtgcagctgcaggagtcgggcccaggactggtgaagccttcggagaccctgtccctcacctgcactgtctctgggggctccatcagtagttactactggagctggatccggcagcccgccgggaagggactagagtggattggccgtatctataccagtgggagcaccaactacaacccctccctcaagagtcgagtcaccatgtcaatagacacgtccaagaaccagttctccctgaaactgaactctgtgaccgccgcggacacggccgtgtattactgtgcgagagatgtagcagtggctggctttgactactggggccagggaaccctggtcaccgtctcctcagcctccaccaagggcccatcggtcttccccctggcaccctcctccaagagcacctctgggggcacagcggccctgggctgcctggtcaaggactacttccccgaaccggtgacggtgtcgtggaactcaggcgccctgaccagcggcgtgcacaccttcccggctgtcctacagtcctcaggactctactccctcagcagcgtggtgaccgtgccctccagcagcttgggcacccagacctacatctgcaacgtgaatcacaagcccagcaacaccaaggtggacaagaaagttgagcccaaatcttgtgacaaaactcacacatgcccaccgtgcccagcacctgaactcctggggggaccgtcagtcttcctcttccccccaaaacccaaggacaccctcatgatctcccggacccctgaggtcacatgcgtggtggtggacgtgagccacgaagaccctgaggtcaagttcaactggtacgtggacggcgtggaggtgcataatgccaagacaaagccgtgtgaggagcagtacggcagcacgtaccgttgtgtcagcgtcctcaccgtcctgcaccaggactggctgaatggcaaggagtacaagtgcaaggtctccaacaaagccctcccagcccccatcgagaaaaccatctccaaagccaaagggcagccccgagaaccacaggtgtacaccctgcccccatcccgggaggagatgaccaagaaccaggtcagcctgacctgcctggtcaaaggcttctatcccagcgacatcgccgtggagtgggagagcaatgggcagccggagaacaactacaagaccacgcctcccgtgctggactccgacggctccttcttcctctatagcaagctcaccgtggacaagagcaggtggcagcaggggaacgtcttctcatgctccgtgatgcatgaggctctgcacaaccactacacgcagaagagcctctccctgtctccgggtaaa

SEQ ID NO: 2056 - DNA, 1353 bp, synthetic construct
  misc_feature 1..1353: note = Description of Artificial Sequence: Synthetic polynucleotide
  source 1..1353: mol_type = other DNA
caggtgcagctggtggagtctgggggaggcgtggtccagcctgggaggtccctgagactctcctgtgcagcgtctggattcaccttcagttactttggcatgcactgggtccgccaggctccaggcaaggggctggagtgggtggcagttatatggtatgatgcaagtaataaatactatgcagacgccgtgaagggccgcttcaccatctccagagacaattccaagaacacgctgtatctgcaaatgaacagcctgagagccgaggacacggctgtgtattactgtgcgcgagatgggacgatttttggagtgctcttgggggactactggggccagggaaccctggtcaccgtctcctcagcctccaccaagggcccatcggtcttccccctggcaccctcctccaagagcacctctgggggcacagcggccctgggctgcctggtcaaggactacttccccgaaccggtgacggtgtcgtggaactcaggcgccctgaccagcggcgtgcacaccttcccggctgtcctacagtcctcaggactctactccctcagcagcgtggtgaccgtgccctccagcagcttgggcacccagacctacatctgcaacgtgaatcacaagcccagcaacaccaaggtggacaagaaagttgagcccaaatcttgtgacaaaactcacacatgcccaccgtgcccagcacctgaactcctggggggaccgtcagtcttcctcttccccccaaaacccaaggacaccctcatgatctcccggacccctgaggtcacatgcgtggtggtggacgtgagccacgaagaccctgaggtcaagttcaactggtacgtggacggcgtggaggtgcataatgccaagacaaagccgtgtgaggagcagtacggcagcacgtaccgttgtgtcagcgtcctcaccgtcctgcaccaggactggctgaatggcaaggagtacaagtgcaaggtctccaacaaagccctcccagcccccatcgagaaaaccatctccaaagccaaagggcagccccgagaaccacaggtgtacaccctgcccccatcccgggaggagatgaccaagaaccaggtcagcctgacctgcctggtcaaaggcttctatcccagcgacatcgccgtggagtgggagagcaatgggcagccggagaacaactacaagaccacgcctcccgtgctggactccgacggctccttcttcctctatagcaagctcaccgtggacaagagcaggtggcagcaggggaacgtcttctcatgctccgtgatgcatgaggctctgcacaaccactacacgcagaagagcctctccctgtctccgggtaaa

SEQ ID NO: 2057 - DNA, 1353 bp, synthetic construct
  misc_feature 1..1353: note = Description of Artificial Sequence: Synthetic polynucleotide
  source 1..1353: mol_type = other DNA
caggtgcagctggtggagtctgggggaggcgtggtccagcctgggaggtccctgagactctcctgtgcagcgtctggattcaccttcagttactttggcatgcactgggtccgccaggctccaggcaaggggctggagtgggtggcagttatatggtatgatgcaagtaataaatactatgcagactccgtgaagggccgcttcaccatctccagagacaattccaagaacacgctgtatctgcaaatgaacagcctgagagccgaggacacggctgtgtattactgtgcgcgagatgggacgatttttggagtgctcttgggggactactggggccagggaaccctggtcaccgtctcctcagcctccaccaagggcccatcggtcttccccctggcaccctcctccaagagcacctctgggggcacagcggccctgggctgcctggtcaaggactacttccccgaaccggtgacggtgtcgtggaactcaggcgccctgaccagcggcgtgcacaccttcccggctgtcctacagtcctcaggactctactccctcagcagcgtggtgaccgtgccctccagcagcttgggcacccagacctacatctgcaacgtgaatcacaagcccagcaacaccaaggtggacaagaaagttgagcccaaatcttgtgacaaaactcacacatgcccaccgtgcccagcacctgaactcctggggggaccgtcagtcttcctcttccccccaaaacccaaggacaccctcatgatctcccggacccctgaggtcacatgcgtggtggtggacgtgagccacgaagaccctgaggtcaagttcaactggtacgtggacggcgtggaggtgcataatgccaagacaaagccgtgtgaggagcagtacggcagcacgtaccgttgtgtcagcgtcctcaccgtcctgcaccaggactggctgaatggcaaggagtacaagtgcaaggtctccaacaaagccctcccagcccccatcgagaaaaccatctccaaagccaaagggcagccccgagaaccacaggtgtacaccctgcccccatcccgggaggagatgaccaagaaccaggtcagcctgacctgcctggtcaaaggcttctatcccagcgacatcgccgtggagtgggagagcaatgggcagccggagaacaactacaagaccacgcctcccgtgctggactccgacggctccttcttcctctatagcaagctcaccgtggacaagagcaggtggcagcaggggaacgtcttctcatgctccgtgatgcatgaggctctgcacaaccactacacgcagaagagcctctccctgtctccgggtaaa

SEQ ID NO: 2058 - DNA, 1353 bp, synthetic construct
  misc_feature 1..1353: note = Description of Artificial Sequence: Synthetic polynucleotide
  source 1..1353: mol_type = other DNA
caggtgcagctggtggagtctgggggaggcgtggtccagcctgggaggtccctgagactctcctgtgcagcgtctggattcaccttcagttactttggcatgcactgggtccgccaggctccaggcaaggggctggagtgggtggcagttatatggtatgatggaagtaataaatactatgcagacgccgtgaagggccgcttcaccatctccagagacaattccaagaacacgctgtatctgcaaatgaacagcctgagagccgaggacacggctgtgtattactgtgcgcgagatgggacgatttttggagtgctcttgggggactactggggccagggaaccctggtcaccgtctcctcagcctccaccaagggcccatcggtcttccccctggcaccctcctccaagagcacctctgggggcacagcggccctgggctgcctggtcaaggactacttccccgaaccggtgacggtgtcgtggaactcaggcgccctgaccagcggcgtgcacaccttcccggctgtcctacagtcctcaggactctactccctcagcagcgtggtgaccgtgccctccagcagcttgggcacccagacctacatctgcaacgtgaatcacaagcccagcaacaccaaggtggacaagaaagttgagcccaaatcttgtgacaaaactcacacatgcccaccgtgcccagcacctgaactcctggggggaccgtcagtcttcctcttccccccaaaacccaaggacaccctcatgatctcccggacccctgaggtcacatgcgtggtggtggacgtgagccacgaagaccctgaggtcaagttcaactggtacgtggacggcgtggaggtgcataatgccaagacaaagccgtgtgaggagcagtacggcagcacgtaccgttgtgtcagcgtcctcaccgtcctgcaccaggactggctgaatggcaaggagtacaagtgcaaggtctccaacaaagccctcccagcccccatcgagaaaaccatctccaaagccaaagggcagccccgagaaccacaggtgtacaccctgcccccatcccgggaggagatgaccaagaaccaggtcagcctgacctgcctggtcaaaggcttctatcccagcgacatcgccgtggagtgggagagcaatgggcagccggagaacaactacaagaccacgcctcccgtgctggactccgacggctccttcttcctctatagcaagctcaccgtggacaagagcaggtggcagcaggggaacgtcttctcatgctccgtgatgcatgaggctctgcacaaccactacacgcagaagagcctctccctgtctccgggtaaa

SEQ ID NO: 2059 - DNA, 1353 bp, synthetic construct; identical to SEQ ID NO: 2056
  misc_feature 1..1353: note = Description of Artificial Sequence: Synthetic polynucleotide
  source 1..1353: mol_type = other DNA

SEQ ID NO: 2060 - DNA, 1353 bp, synthetic construct; identical to SEQ ID NO: 2056
  misc_feature 1..1353: note = Description of Artificial Sequence: Synthetic polynucleotide
  source 1..1353: mol_type = other DNA

SEQ ID NO: 2061 - DNA, 1353 bp, synthetic construct
  misc_feature 1..1353: note = Description of Artificial Sequence: Synthetic polynucleotide
  source 1..1353: mol_type = other DNA
caggtgcagctggtggagtctgggggaggcgtggtccagcctgggaggtccctgagactctcctgtgcagcgtctggattcaccttcagttactttggcatgcactgggtccgccaggctccaggcaaggggctggagtgggtggcagttatatggtatgatgcaagtaataaatactatgcagacgccgtgaagggccgcttcaccatctccagagacaattccaagaacacgctgtatctgcaaatgaacagcctgagagccgaggacacggctgtgtattactgtgcgcgagataggacgatttttggagtgctcttgggggactactggggccagggaaccctggtcaccgtctcctcagcctccaccaagggcccatcggtcttccccctggcaccctcctccaagagcacctctgggggcacagcggccctgggctgcctggtcaaggactacttccccgaaccggtgacggtgtcgtggaactcaggcgccctgaccagcggcgtgcacaccttcccggctgtcctacagtcctcaggactctactccctcagcagcgtggtgaccgtgccctccagcagcttgggcacccagacctacatctgcaacgtgaatcacaagcccagcaacaccaaggtggacaagaaagttgagcccaaatcttgtgacaaaactcacacatgcccaccgtgcccagcacctgaactcctggggggaccgtcagtcttcctcttccccccaaaacccaaggacaccctcatgatctcccggacccctgaggtcacatgcgtggtggtggacgtgagccacgaagaccctgaggtcaagttcaactggtacgtggacggcgtggaggtgcataatgccaagacaaagccgtgtgaggagcagtacggcagcacgtaccgttgtgtcagcgtcctcaccgtcctgcaccaggactggctgaatggcaaggagtacaagtgcaaggtctccaacaaagccctcccagcccccatcgagaaaaccatctccaaagccaaagggcagccccgagaaccacaggtgtacaccctgcccccatcccgggaggagatgaccaagaaccaggtcagcctgacctgcctggtcaaaggcttctatcccagcgacatcgccgtggagtgggagagcaatgggcagccggagaacaactacaagaccacgcctcccgtgctggactccgacggctccttcttcctctatagcaagctcaccgtggacaagagcaggtggcagcaggggaacgtcttctcatgctccgtgatgcatgaggctctgcacaaccactacacgcagaagagcctctccctgtctccgggtaaa

SEQ ID NO: 2062 - DNA, 1353 bp, synthetic construct
  misc_feature 1..1353: note = Description of Artificial Sequence: Synthetic polynucleotide
  source 1..1353: mol_type = other DNA
caggtgcagctggtggagtctgggggaggcgtggtccagcctgggaggtccctgagactctcctgtgcagcgtctggattcactttcagtaactttggcatgcactgggtccgccaggctccaggcaaggggctggagtgggtggcagttatatggtatgatgcaagtaatgaaaactatgcagacgccgtgaagggccgattcaccatctccagagacaattccaagaatacgctgtatctgcaaatgaacagcctgagagtcgcggacacggctgtgtattattgtgcgcgagatgggacgatctttggagtggtcttgggggactactggggccagggaaccctggtcaccgtctcctcagcctccaccaagggcccatcggtcttccccctggcaccctcctccaagagcacctctgggggcacagcggccctgggctgcctggtcaaggactacttccccgaaccggtgacggtgtcgtggaactcaggcgccctgaccagcggcgtgcacaccttcccggctgtcctacagtcctcaggactctactccctcagcagcgtggtgaccgtgccctccagcagcttgggcacccagacctacatctgcaacgtgaatcacaagcccagcaacaccaaggtggacaagaaagttgagcccaaatcttgtgacaaaactcacacatgcccaccgtgcccagcacctgaactcctggggggaccgtcagtcttcctcttccccccaaaacccaaggacaccctcatgatctcccggacccctgaggtcacatgcgtggtggtggacgtgagccacgaagaccctgaggtcaagttcaactggtacgtggacggcgtggaggtgcataatgccaagacaaagccgtgtgaggagcagtacggcagcacgtaccgttgtgtcagcgtcctcaccgtcctgcaccaggactggctgaatggcaaggagtacaagtgcaaggtctccaacaaagccctcccagcccccatcgagaaaaccatctccaaagccaaagggcagccccgagaaccacaggtgtacaccctgcccccatcccgggaggagatgaccaagaaccaggtcagcctgacctgcctggtcaaaggcttctatcccagcgacatcgccgtggagtgggagagcaatgggcagccggagaacaactacaagaccacgcctcccgtgctggactccgacggctccttcttcctctatagcaagctcaccgtggacaagagcaggtggcagcaggggaacgtcttctcatgctccgtgatgcatgaggctctgcacaaccactacacgcagaagagcctctccctgtctccgggtaaa

SEQ ID NO: 2063 - DNA, 1353 bp, synthetic construct; identical to SEQ ID NO: 2062
  misc_feature 1..1353: note = Description of Artificial Sequence: Synthetic polynucleotide
  source 1..1353: mol_type = other DNA

SEQ ID NO: 2064 - DNA, 1353 bp, synthetic construct; identical to SEQ ID NO: 2062
  misc_feature 1..1353: note = Description of Artificial Sequence: Synthetic polynucleotide
  source 1..1353: mol_type = other DNA

SEQ ID NO: 2065 - DNA, 1353 bp, synthetic construct
  misc_feature 1..1353: note = Description of Artificial Sequence: Synthetic polynucleotide
  source 1..1353: mol_type = other DNA
caggtgcagctggtggagtctgggggaggcgtggtccagcctgggaggtccctgagactctcctgtgcagcgtctggattcactttcagtaactttggcatgcactgggtccgccaggctccaggcaaggggctggagtgggtggcagttatatggtatgatgcaagtaatgaaaactatgcagactccgtgaagggccgattcaccatctccagagacaattccaagaatacgctgtatctgcacatgaacagcctgagagtcgcggacacggctgtgtattattgtgcgcgagatgggacgatctttggagtggtcttgggggactactggggccagggaaccctggtcaccgtctcctcagcctccaccaagggcccatcggtcttccccctggcaccctcctccaagagcacctctgggggcacagcggccctgggctgcctggtcaaggactacttccccgaaccggtgacggtgtcgtggaactcaggcgccctgaccagcggcgtgcacaccttcccggctgtcctacagtcctcaggactctactccctcagcagcgtggtgaccgtgccctccagcagcttgggcacccagacctacatctgcaacgtgaatcacaagcccagcaacaccaaggtggacaagaaagttgagcccaaatcttgtgacaaaactcacacatgcccaccgtgcccagcacctgaactcctggggggaccgtcagtcttcctcttccccccaaaacccaaggacaccctcatgatctcccggacccctgaggtcacatgcgtggtggtggacgtgagccacgaagaccctgaggtcaagttcaactggtacgtggacggcgtggaggtgcataatgccaagacaaagccgtgtgaggagcagtacggcagcacgtaccgttgtgtcagcgtcctcaccgtcctgcaccaggactggctgaatggcaaggagtacaagtgcaaggtctccaacaaagccctcccagcccccatcgagaaaaccatctccaaagccaaagggcagccccgagaaccacaggtgtacaccctgcccccatcccgggaggagatgaccaagaaccaggtcagcctgacctgcctggtcaaaggcttctatcccagcgacatcgccgtggagtgggagagcaatgggcagccggagaacaactacaagaccacgcctcccgtgctggactccgacggctccttcttcctctatagcaagctcaccgtggacaagagcaggtggcagcaggggaacgtcttctcatgctccgtgatgcatgaggctctgcacaaccactacacgcagaagagcctctccctgtctccgggtaaa

SEQ ID NO: 2066 - DNA, 1353 bp, synthetic construct
  misc_feature 1..1353: note = Description of Artificial Sequence: Synthetic polynucleotide
  source 1..1353: mol_type = other DNA
caggtgcagctggtggagtctgggggaggcgtggtccagcctgggaggtccctgagactctcctgtgcagcgtctggattcactttcagtaactttggcatgcactgggtccgccaggctccaggcaaggggctggagtgggtggcagttatatggtatgatggaagtaatgaaaactatgcagacgccgtgaagggccgattcaccatctccagagacaattccaagaatacgctgtatctgcacatgaacagcctgagagtcgcggacacggctgtgtattattgtgcgcgagatgggacgatctttggagtggtcttgggggactactggggccagggaaccctggtcaccgtctcctcagcctccaccaagggcccatcggtcttccccctggcaccctcctccaagagcacctctgggggcacagcggccctgggctgcctggtcaaggactacttccccgaaccggtgacggtgtcgtggaactcaggcgccctgaccagcggcgtgcacaccttcccggctgtcctacagtcctcaggactctactccctcagcagcgtggtgaccgtgccctccagcagcttgggcacccagacctacatctgcaacgtgaatcacaagcccagcaacaccaaggtggacaagaaagttgagcccaaatcttgtgacaaaactcacacatgcccaccgtgcccagcacctgaactcctggggggaccgtcagtcttcctcttccccccaaaacccaaggacaccctcatgatctcccggacccctgaggtcacatgcgtggtggtggacgtgagccacgaagaccctgaggtcaagttcaactggtacgtggacggcgtggaggtgcataatgccaagacaaagccgtgtgaggagcagtacggcagcacgtaccgttgtgtcagcgtcctcaccgtcctgcaccaggactggctgaatggcaaggagtacaagtgcaaggtctccaacaaagccctcccagcccccatcgagaaaaccatctccaaagccaaagggcagccccgagaaccacaggtgtacaccctgcccccatcccgggaggagatgaccaagaaccaggtcagcctgacctgcctggtcaaaggcttctatcccagcgacatcgccgtggagtgggagagcaatgggcagccggagaacaactacaagaccacgcctcccgtgctggactccgacggctccttcttcctctatagcaagctcaccgtggacaagagcaggtggcagcaggggaacgtcttctcatgctccgtgatgcatgaggctctgcacaaccactacacgcagaagagcctctccctgtctccgggtaaa

SEQ ID NO: 2067 - DNA, 1353 bp, synthetic construct
  misc_feature 1..1353: note = Description of Artificial Sequence: Synthetic polynucleotide
  source 1..1353: mol_type = other DNA
caggtgcagctggtggagtctgggggaggcgtggtccagcctgggaggtccctgagactctcctgtgcagcgtctggattcactttcagtaactttggcatgcactgggtccgccaggctccaggcaaggggctggagtgggtggcagttatatggtatgatgcaagtaatgaaaactatgcagacgccgtgaagggccgattcaccatctccagagacaattccaagaatacgctgtatctgcaaatgaacagcctgagagtcgaggacacggctgtgtattattgtgcgcgagataggacgatctttggagtggtcttgggggactactggggccagggaaccctggtcaccgtctcctcagcctccaccaagggcccatcggtcttccccctggcaccctcctccaagagcacctctgggggcacagcggccctgggctgcctggtcaaggactacttccccgaaccggtgacggtgtcgtggaactcaggcgccctgaccagcggcgtgcacaccttcccggctgtcctacagtcctcaggactctactccctcagcagcgtggtgaccgtgccctccagcagcttgggcacccagacctacatctgcaacgtgaatcacaagcccagcaacaccaaggtggacaagaaagttgagcccaaatcttgtgacaaaactcacacatgcccaccgtgcccagcacctgaactcctggggggaccgtcagtcttcctcttccccccaaaacccaaggacaccctcatgatctcccggacccctgaggtcacatgcgtggtggtggacgtgagccacgaagaccctgaggtcaagttcaactggtacgtggacggcgtggaggtgcataatgccaagacaaagccgtgtgaggagcagtacggcagcacgtaccgttgtgtcagcgtcctcaccgtcctgcaccaggactggctgaatggcaaggagtacaagtgcaaggtctccaacaaagccctcccagcccccatcgagaaaaccatctccaaagccaaagggcagccccgagaaccacaggtgtacaccctgcccccatcccgggaggagatgaccaagaaccaggtcagcctgacctgcctggtcaaaggcttctatcccagcgacatcgccgtggagtgggagagcaatgggcagccggagaacaactacaagaccacgcctcccgtgctggactccgacggctccttcttcctctatagcaagctcaccgtggacaagagcaggtggcagcaggggaacgtcttctcatgctccgtgatgcatgaggctctgcacaaccactacacgcagaagagcctctccctgtctccgggtaaa

SEQ ID NO: 2068 - DNA, 1353 bp, synthetic construct
  misc_feature 1..1353: note = Description of Artificial Sequence: Synthetic polynucleotide
  source 1..1353: mol_type = other DNA
caggtgcagctggtggagtctgggggaggcgtggtccagcctgggaggtccctgagactctcctgtgcagcgtctggattcactttcagtaactttggcatgcactgggtccgccaggctccaggcaaggggctggagtgggtggcagttatatggtatgatgcaagtaatgaaaactatgcagacgccgtgaagggccgattcaccatctccagagacaattccaagaatacgctgtatctgcaaatgaacagcctgagagtcgaggacacggctgtgtattattgtgcgcgagatgggacgatctttggagtggtcttgggggactactggggccagggaaccctggtcaccgtctcctcagcctccaccaagggcccatcggtcttccccctggcaccctcctccaagagcacctctgggggcacagcggccctgggctgcctggtcaaggactacttccccgaaccggtgacggtgtcgtggaactcaggcgccctgaccagcggcgtgcacaccttcccggctgtcctacagtcctcaggactctactccctcagcagcgtggtgaccgtgccctccagcagcttgggcacccagacctacatctgcaacgtgaatcacaagcccagcaacaccaaggtggacaagaaagttgagcccaaatcttgtgacaaaactcacacatgcccaccgtgcccagcacctgaactcctggggggaccgtcagtcttcctcttccccccaaaacccaaggacaccctcatgatctcccggacccctgaggtcacatgcgtggtggtggacgtgagccacgaagaccctgaggtcaagttcaactggtacgtggacggcgtggaggtgcataatgccaagacaaagccgtgtgaggagcagtacggcagcacgtaccgttgtgtcagcgtcctcaccgtcctgcaccaggactggctgaatggcaaggagtacaagtgcaaggtctccaacaaagccctcccagcccccatcgagaaaaccatctccaaagccaaagggcagccccgagaaccacaggtgtacaccctgcccccatcccgggaggagatgaccaagaaccaggtcagcctgacctgcctggtcaaaggcttctatcccagcgacatcgccgtggagtgggagagcaatgggcagccggagaacaactacaagaccacgcctcccgtgctggactccgacggctccttcttcctctatagcaagctcaccgtggacaagagcaggtggcagcaggggaacgtcttctcatgctccgtgatgcatgaggctctgcacaaccactacacgcagaagagcctctccctgtctccgggtaaa

SEQ ID NO: 2069 - DNA, 1353 bp, synthetic construct
  misc_feature 1..1353: note = Description of Artificial Sequence: Synthetic polynucleotide
  source 1..1353: mol_type = other DNA
caggtgcagctggtggagtctgggggaggcgtggtccagcctgggaggtccctgagactctcctgtgcagcgtctggattcactttcagtaactttggcatgcactgggtccgccaggccccaggcaaggggctggagtgggtggcagttatatggtatgatggaagtaatgaaaactatgcagactccgtgaagggccgattcaccatctccagagacaattccaagaacacgctgtatctgcacatgaacagcctgagagccgcggacacggctgtgtattactgtgcgagagatgggacgatctttggagtggtcttgggggactactggggccagggaaccctggtcaccgtctcctcagcctccaccaagggcccatcggtcttccccctggcaccctcctccaagagcacctctgggggcacagcggccctgggctgcctggtcaaggactacttccccgaaccggtgacggtgtcgtggaactcaggcgccctgaccagcggcgtgcacaccttcccggctgtcctacagtcctcaggactctactccctcagcagcgtggtgaccgtgccctccagcagcttgggcacccagacctacatctgcaacgtgaatcacaagcccagcaacaccaaggtggacaagaaagttgagcccaaatcttgtgacaaaactcacacatgcccaccgtgcccagcacctgaactcctggggggaccgtcagtcttcctcttccccccaaaacccaaggacaccctcatgatctcccggacccctgaggtcacatgcgtggtggtggacgtgagccacgaagaccctgaggtcaagttcaactggtacgtggacggcgtggaggtgcataatgccaagacaaagccgtgtgaggagcagtacggcagcacgtaccgttgtgtcagcgtcctcaccgtcctgcaccaggactggctgaatggcaaggagtacaagtgcaaggtctccaacaaagccctcccagcccccatcgagaaaaccatctccaaagccaaagggcagccccgagaaccacaggtgtacaccctgcccccatcccgggaggagatgaccaagaaccaggtcagcctgacctgcctggtcaaaggcttctatcccagcgacatcgccgtggagtgggagagcaatgggcagccggagaacaactacaagaccacgcctcccgtgctggactccgacggctccttcttcctctatagcaagctcaccgtggacaagagcaggtggcagcaggggaacgtcttctcatgctccgtgatgcatgaggctctgcacaaccactacacgcagaagagcctctccctgtctccgggtaaa

SEQ ID NO: 2070 - DNA, 1353 bp, synthetic construct
  misc_feature 1..1353: note = Description of Artificial Sequence: Synthetic polynucleotide
  source 1..1353: mol_type = other DNA
caggtgcagctggtggagtctgggggaggcgtggtccagcctgggaggtccctgagactctcctgtgcagcgtctggattcactttcagtaactttggcatgcactgggtccgccaggccccaggcaaggggctggagtgggtggcagttatatggtatgatgcaagtaatgaaaactatgcagacgccgtgaagggccgattcaccatctccagagacaattccaagaacacgctgtatctgcaaatgaacagcctgagagccgcggacacggctgtgtattactgtgcgagagatgggacgatctttggagtggtcttgggggactactggggccagggaaccctggtcaccgtctcctcagcctccaccaagggcccatcggtcttccccctggcaccctcctccaagagcacctctgggggcacagcggccctgggctgcctggtcaaggactacttccccgaaccggtgacggtgtcgtggaactcaggcgccctgaccagcggcgtgcacaccttcccggctgtcctacagtcctcaggactctactccctcagcagcgtggtgaccgtgccctccagcagcttgggcacccagacctacatctgcaacgtgaatcacaagcccagcaacaccaaggtggacaagaaagttgagcccaaatcttgtgacaaaactcacacatgcccaccgtgcccagcacctgaactcctggggggaccgtcagtcttcctcttccccccaaaacccaaggacaccctcatgatctcccggacccctgaggtcacatgcgtggtggtggacgtgagccacgaagaccctgaggtcaagttcaactggtacgtggacggcgtggaggtgcataatgccaagacaaagccgtgtgaggagcagtacggcagcacgtaccgttgtgtcagcgtcctcaccgtcctgcaccaggactggctgaatggcaaggagtacaagtgcaaggtctccaacaaagccctcccagcccccatcgagaaaaccatctccaaagccaaagggcagccccgagaaccacaggtgtacaccctgcccccatcccgggaggagatgaccaagaaccaggtcagcctgacctgcctggtcaaaggcttctatcccagcgacatcgccgtggagtgggagagcaatgggcagccggagaacaactacaagaccacgcctcccgtgctggactccgacggctccttcttcctctatagcaagctcaccgtggacaagagcaggtggcagcaggggaacgtcttctcatgctccgtgatgcatgaggctctgcacaaccactacacgcagaagagcctctccctgtctccgggtaaa

SEQ ID NO: 2071 - DNA, 1353 bp, synthetic construct
  misc_feature 1..1353: note = Description of Artificial Sequence: Synthetic polynucleotide
  source 1..1353: mol_type = other DNA
caggtgcagctggtggagtctgggggaggcgtggtccagcctgggaggtccctgagactctcctgtgcagcgtctggattcactttcagtaactttggcatgcactgggtccgccaggccccaggcaaggggctggagtgggtggcagttatatggtatgatgcaagtaatgaaaactatgcagacgccgtgaagggccgattcaccatctccagagacaattccaagaacacgctgtatctgcacatgaacagcctgagagccgcggacacggctgtgtattactgtgcgagagatgggacgatctttggagtggtcttgggggactactggggccagggaaccctggtcaccgtctcctcagcctccaccaagggcccatcggtcttccccctggcaccctcctccaagagcacctctgggggcacagcggccctgggctgcctggtcaaggactacttccccgaaccggtgacggtgtcgtggaactcaggcgccctgaccagcggcgtgcacaccttcccggctgtcctacagtcctcaggactctactccctcagcagcgtggtgaccgtgccctccagcagcttgggcacccagacctacatctgcaacgtgaatcacaagcccagcaacaccaaggtggacaagaaagttgagcccaaatcttgtgacaaaactcacacatgcccaccgtgcccagcacctgaactcctggggggaccgtcagtcttcctcttccccccaaaacccaaggacaccctcatgatctcccggacccctgaggtcacatgcgtggtggtggacgtgagccacgaagaccctgaggtcaagttcaactggtacgtggacggcgtggaggtgcataatgccaagacaaagccgtgtgaggagcagtacggcagcacgtaccgttgtgtcagcgtcctcaccgtcctgcaccaggactggctgaatggcaaggagtacaagtgcaaggtctccaacaaagccctcccagcccccatcgagaaaaccatctccaaagccaaagggcagccccgagaaccacaggtgtacaccctgcccccatcccgggaggagatgaccaagaaccaggtcagcctgacctgcctggtcaaaggcttctatcccagcgacatcgccgtggagtgggagagcaatgggcagccggagaacaactacaagaccacgcctcccgtgctggactccgacggctccttcttcctctatagcaagctcaccgtggacaagagcaggtggcagcaggggaacgtcttctcatgctccgtgatgcatgaggctctgcacaaccactacacgcagaagagcctctccctgtctccgggtaaa

SEQ ID NO: 2072 - DNA, 1353 bp, synthetic construct; identical to SEQ ID NO: 2070
  misc_feature 1..1353: note = Description of Artificial Sequence: Synthetic polynucleotide
  source 1..1353: mol_type = other DNA

SEQ ID NO: 2073 - DNA, 1353 bp, synthetic construct; identical to SEQ ID NO: 2070
  misc_feature 1..1353: note = Description of Artificial Sequence: Synthetic polynucleotide
  source 1..1353: mol_type = other DNA

SEQ ID NO: 2074 - DNA, 1353 bp, synthetic construct; identical to SEQ ID NO: 2071
  misc_feature 1..1353: note = Description of Artificial Sequence: Synthetic polynucleotide
  source 1..1353: mol_type = other DNA

SEQ ID NO: 2075 - DNA, 1353 bp, synthetic construct; identical to SEQ ID NO: 2071
  misc_feature 1..1353: note = Description of Artificial Sequence: Synthetic polynucleotide
  source 1..1353: mol_type = other DNA

SEQ ID NO: 2076 - DNA, 1353 bp, synthetic construct; identical to SEQ ID NO: 2070
  misc_feature 1..1353: note = Description of Artificial Sequence: Synthetic polynucleotide
  source 1..1353: mol_type = other DNA

SEQ ID NO: 2077 - DNA, 1353 bp, synthetic construct
  misc_feature 1..1353: note = Description of Artificial Sequence: Synthetic polynucleotide
  source 1..1353: mol_type = other DNA
caggtgcagctggtggagtctgggggaggcgtggtccagcctgggaggtccctgagactctcctgtgcagcgtctggattcactttcagtaactttggcatgcactgggtccgccaggccccaggcaaggggctggagtgggtggcagttatatggtatgatggaagtaatgaaaactatgcagacgccgtgaagggccgattcaccatctccagagacaattccaagaacacgctgtatctgcaaatgaacagcctgagagccgcggacacggctgtgtattactgtgcgagagatgggacgatctttggagtggtcttgggggactactggggccagggaaccctggtcaccgtctcctcagcctccaccaagggcccatcggtcttccccctggcaccctcctccaagagcacctctgggggcacagcggccctgggctgcctggtcaaggactacttccccgaaccggtgacggtgtcgtggaactcaggcgccctgaccagcggcgtgcacaccttcccggctgtcctacagtcctcaggactctactccctcagcagcgtggtgaccgtgccctccagcagcttgggcacccagacctacatctgcaacgtgaatcacaagcccagcaacaccaaggtggacaagaaagttgagcccaaatcttgtgacaaaactcacacatgcccaccgtgcccagcacctgaactcctggggggaccgtcagtcttcctcttccccccaaaacccaaggacaccctcatgatctcccggacccctgaggtcacatgcgtggtggtggacgtgagccacgaagaccctgaggtcaagttcaactggtacgtggacggcgtggaggtgcataatgccaagacaaagccgtgtgaggagcagtacggcagcacgtaccgttgtgtcagcgtcctcaccgtcctgcaccaggactggctgaatggcaaggagtacaagtgcaaggtctccaacaaagccctcccagcccccatcgagaaaaccatctccaaagccaaagggcagccccgagaaccacaggtgtacaccctgcccccatcccgggaggagatgaccaagaaccaggtcagcctgacctgcctggtcaaaggcttctatcccagcgacatcgccgtggagtgggagagcaatgggcagccggagaacaactacaagaccacgcctcccgtgctggactccgacggctccttcttcctctatagcaagctcaccgtggacaagagcaggtggcagcaggggaacgtcttctcatgctccgtgatgcatgaggctctgcacaaccactacacgcagaagagcctctccctgtctccgggtaaa

SEQ ID NO: 2078 - DNA, 1353 bp, synthetic construct
  misc_feature 1..1353: note = Description of Artificial Sequence: Synthetic polynucleotide
  source 1..1353: mol_type = other DNA
caggtgcagctggtggagtctgggggaggcgtggtccagcctgggaggtccctgagactctcctgtgcagcgtctggattcactttcagtaactttggcatgcactgggtccgccaggccccaggcaaggggctggagtgggtggcagttatatggtatgatgcaagtaatgaaaactatgcagactccgtgaagggccgattcaccatctccagagacaattccaagaacacgctgtatctgcaaatgaacagcctgagagccgcggacacggctgtgtattactgtgcgagagatgggacgatctttggagtggtcttgggggactactggggccagggaaccctggtcaccgtctcctcagcctccaccaagggcccatcggtcttccccctggcaccctcctccaagagcacctctgggggcacagcggccctgggctgcctggtcaaggactacttccccgaaccggtgacggtgtcgtggaactcaggcgccctgaccagcggcgtgcacaccttcccggctgtcctacagtcctcaggactctactccctcagcagcgtggtgaccgtgccctccagcagcttgggcacccagacctacatctgcaacgtgaatcacaagcccagcaacaccaaggtggacaagaaagttgagcccaaatcttgtgacaaaactcacacatgcccaccgtgcccagcacctgaactcctggggggaccgtcagtcttcctcttccccccaaaacccaaggacaccctcatgatctcccggacccctgaggtcacatgcgtggtggtggacgtgagccacgaagaccctgaggtcaagttcaactggtacgtggacggcgtggaggtgcataatgccaagacaaagccgtgtgaggagcagtacggcagcacgtaccgttgtgtcagcgtcctcaccgtcctgcaccaggactggctgaatggcaaggagtacaagtgcaaggtctccaacaaagccctcccagcccccatcgagaaaaccatctccaaagccaaagggcagccccgagaaccacaggtgtacaccctgcccccatcccgggaggagatgaccaagaaccaggtcagcctgacctgcctggtcaaaggcttctatcccagcgacatcgccgtggagtgggagagcaatgggcagccggagaacaactacaagaccacgcctcccgtgctggactccgacggctccttcttcctctatagcaagctcaccgtggacaagagcaggtggcagcaggggaacgtcttctcatgctccgtgatgcatgaggctctgcacaaccactacacgcagaagagcctctccctgtctccgggtaaa

SEQ ID NO: 2079 - DNA, 1353 bp, synthetic construct
  misc_feature 1..1353: note = Description of Artificial Sequence: Synthetic polynucleotide
  source 1..1353: mol_type = other DNA
caggtgcagctggtggagtctgggggaggcgtggtccagcctgggaggtccctgagactctcctgtgcagcgtctggattcactttcagtaactttggcatgcactgggtccgccaggccccaggcaaggggctggagtgggtggcagttatatggtatgatgcaagtaatgaaaactatgcagacgccgtgaagggccgattcaccatctccagagacaattccaagaacacgctgtatctgcaaatgaacagcctgagagccgaggacacggctgtgtattactgtgcgagagataggacgatctttggagtggtcttgggggactactggggccagggaaccctggtcaccgtctcctcagcctccaccaagggcccatcggtcttccccctggcaccctcctccaagagcacctctgggggcacagcggccctgggctgcctggtcaaggactacttccccgaaccggtgacggtgtcgtggaactcaggcgccctgaccagcggcgtgcacaccttcccggctgtcctacagtcctcaggactctactccctcagcagcgtggtgaccgtgccctccagcagcttgggcacccagacctacatctgcaacgtgaatcacaagcccagcaacaccaaggtggacaagaaagttgagcccaaatcttgtgacaaaactcacacatgcccaccgtgcccagcacctgaactcctggggggaccgtcagtcttcctcttccccccaaaacccaaggacaccctcatgatctcccggacccctgaggtcacatgcgtggtggtggacgtgagccacgaagaccctgaggtcaagttcaactggtacgtggacggcgtggaggtgcataatgccaagacaaagccgtgtgaggagcagtacggcagcacgtaccgttgtgtcagcgtcctcaccgtcctgcaccaggactggctgaatggcaaggagtacaagtgcaaggtctccaacaaagccctcccagcccccatcgagaaaaccatctccaaagccaaagggcagccccgagaaccacaggtgtacaccctgcccccatcccgggaggagatgaccaagaaccaggtcagcctgacctgcctggtcaaaggcttctatcccagcgacatcgccgtggagtgggagagcaatgggcagccggagaacaactacaagaccacgcctcccgtgctggactccgacggctccttcttcctctatagcaagctcaccgtggacaagagcaggtggcagcaggggaacgtcttctcatgctccgtgatgcatgaggctctgcacaaccactacacgcagaagagcctctccctgtctccgggtaaa

SEQ ID NO: 2080 - DNA, 1353 bp, synthetic construct
  misc_feature 1..1353: note = Description of Artificial Sequence: Synthetic polynucleotide
  source 1..1353: mol_type = other DNA
caggtgcagctggtggagtctgggggaggcgtggtccagcctgggaggtccctgagactctcctgtgcagcgtctggattcactttcagtaactttggcatgcactgggtccgccaggccccaggcaaggggctggagtgggtggcagttatatggtatgatgcaagtaatgaaaactatgcagacgccgtgaagggccgattcaccatctccagagacaattccaagaacacgctgtatctgcaaatgaacagcctgagagccgaggacacggctgtgtattactgtgcgagagatgggacgatctttggagtggtcttgggggactactggggccagggaaccctggtcaccgtctcctcagcctccaccaagggcccatcggtcttccccctggcaccctcctccaagagcacctctgggggcacagcggccctgggctgcctggtcaaggactacttccccgaaccggtgacggtgtcgtggaactcaggcgccctgaccagcggcgtgcacaccttcccggctgtcctacagtcctcaggactctactccctcagcagcgtggtgaccgtgccctccagcagcttgggcacccagacctacatctgcaacgtgaatcacaagcccagcaacaccaaggtggacaagaaagttgagcccaaatcttgtgacaaaactcacacatgcccaccgtgcccagcacctgaactcctggggggaccgtcagtcttcctcttccccccaaaacccaaggacaccctcatgatctcccggacccctgaggtcacatgcgtggtggtggacgtgagccacgaagaccctgaggtcaagttcaactggtacgtggacggcgtggaggtgcataatgccaagacaaagccgtgtgaggagcagtacggcagcacgtaccgttgtgtcagcgtcctcaccgtcctgcaccaggactggctgaatggcaaggagtacaagtgcaaggtctccaacaaagccctcccagcccccatcgagaaaaccatctccaaagccaaagggcagccccgagaaccacaggtgtacaccctgcccccatcccgggaggagatgaccaagaaccaggtcagcctgacctgcctggtcaaaggcttctatcccagcgacatcgccgtggagtgggagagcaatgggcagccggagaacaactacaagaccacgcctcccgtgctggactccgacggctccttcttcctctatagcaagctcaccgtggacaagagcaggtggcagcaggggaacgtcttctcatgctccgtgatgcatgaggctctgcacaaccactacacgcagaagagcctctccctgtctccgggtaaa

SEQ ID NO: 2081 - DNA, 1350 bp, synthetic construct
  misc_feature 1..1350: note = Description of Artificial Sequence: Synthetic polynucleotide
  source 1..1350: mol_type = other DNA
caggtgcaactggtggagtctgggggaggcgtggtccagcctgggaggtccctgagactctcctgtgcagcgtctggattcaccttcagtagctatggcatgcactgggtccgccaggctccaggcaaggggctggagtgggtggcagttatatggtatgatgcaagtaataaatactatgcagacgccgtgaagggccgattcaccatctccagggacaattccaagaacacgctgtatctgcaaatgaacagcctgagagccgaggacacggctgtgtattactgtgcgagagataggacgatttttggagtggttcttgactactggggccagggaaccctggtcaccgtctcctcagcctccaccaagggcccatcggtcttccccctggcaccctcctccaagagcacctctgggggcacagcggccctgggctgcctggtcaaggactacttccccgaaccggtgacggtgtcgtggaactcaggcgccctgaccagcggcgtgcacaccttcccggctgtcctacagtcctcaggactctactccctcagcagcgtggtgaccgtgccctccagcagcttgggcacccagacctacatctgcaacgtgaatcacaagcccagcaacaccaaggtggacaagaaagttgagcccaaatcttgtgacaaaactcacacatgcccaccgtgcccagcacctgaactcctggggggaccgtcagtcttcctcttccccccaaaacccaaggacaccctcatgatctcccggacccctgaggtcacatgcgtggtggtggacgtgagccacgaagaccctgaggtcaagttcaactggtacgtggacggcgtggaggtgcataatgccaagacaaagccgtgtgaggagcagtacggcagcacgtaccgttgtgtcagcgtcctcaccgtcctgcaccaggactggctgaatggcaaggagtacaagtgcaaggtctccaacaaagccctcccagcccccatcgagaaaaccatctccaaagccaaagggcagccccgagaaccacaggtgtacaccctgcccccatcccgggaggagatgaccaagaaccaggtcagcctgacctgcctggtcaaaggcttctatcccagcgacatcgccgtggagtgggagagcaatgggcagccggagaacaactacaagaccacgcctcccgtgctggactccgacggctccttcttcctctatagcaagctcaccgtggacaagagcaggtggcagcaggggaacgtcttctcatgctccgtgatgcatgaggctctgcacaaccactacacgcagaagagcctctccctgtctccgggtaaa

SEQ ID NO: 2082 - DNA, 1350 bp, synthetic construct
  misc_feature 1..1350: note = Description of Artificial Sequence: Synthetic polynucleotide
  source 1..1350: mol_type = other DNA
caggtgcaactggtggagtctgggggaggcgtggtccagcctgggaggtccctgagactctcctgtgcagcgtctggattcaccttcagtagctatggcatgcactgggtccgccaggctccaggcaaggggctggagtgggtggcagttatatggtatgatgcaagtaataaatactatgcagacgccgtgaagggccgattcaccatctccagcgacaattccaagaacacgctgtatctgcaaatgaacagcctgagagccgaggacacggctgtgtattactgtgcgagagataggacgatttttggagtggttcttgactactggggccagggaaccctggtcaccgtctcctcagcctccaccaagggcccatcggtcttccccctggcaccctcctccaagagcacctctgggggcacagcggccctgggctgcctggtcaaggactacttccccgaaccggtgacggtgtcgtggaactcaggcgccctgaccagcggcgtgcacaccttcccggctgtcctacagtcctcaggactctactccctcagcagcgtggtgaccgtgccctccagcagcttgggcacccagacctacatctgcaacgtgaatcacaagcccagcaacaccaaggtggacaagaaagttgagcccaaatcttgtgacaaaactcacacatgcccaccgtgcccagcacctgaactcctggggggaccgtcagtcttcctcttccccccaaaacccaaggacaccctcatgatctcccggacccctgaggtcacatgcgtggtggtggacgtgagccacgaagaccctgaggtcaagttcaactggtacgtggacggcgtggaggtgcataatgccaagacaaagccgtgtgaggagcagtacggcagcacgtaccgttgtgtcagcgtcctcaccgtcctgcaccaggactggctgaatggcaaggagtacaagtgcaaggtctccaacaaagccctcccagcccccatcgagaaaaccatctccaaagccaaagggcagccccgagaaccacaggtgtacaccctgcccccatcccgggaggagatgaccaagaaccaggtcagcctgacctgcctggtcaaaggcttctatcccagcgacatcgccgtggagtgggagagcaatgggcagccggagaacaactacaagaccacgcctcccgtgctggactccgacggctccttcttcctctatagcaagctcaccgtggacaagagcaggtggcagcaggggaacgtcttctcatgctccgtgatgcatgaggctctgcacaaccactacacgcagaagagcctctccctgtctccgggtaaa

SEQ ID NO: 2083 - DNA, 1350 bp, synthetic construct; identical to SEQ ID NO: 2081
  misc_feature 1..1350: note = Description of Artificial Sequence: Synthetic polynucleotide
  source 1..1350: mol_type = other DNA

SEQ ID NO: 2084 - DNA, 1350 bp, synthetic construct; identical to SEQ ID NO: 2081
  misc_feature 1..1350: note = Description of Artificial Sequence: Synthetic polynucleotide
  source 1..1350: mol_type = other DNA

SEQ ID NO: 2085 - DNA, 1350 bp, synthetic construct; identical to SEQ ID NO: 2082
  misc_feature 1..1350: note = Description of Artificial Sequence: Synthetic polynucleotide
  source 1..1350: mol_type = other DNA

SEQ ID NO: 2086 - DNA, 1350 bp, synthetic construct; identical to SEQ ID NO: 2082
  misc_feature 1..1350: note = Description of Artificial Sequence: Synthetic polynucleotide
  source 1..1350: mol_type = other DNA

SEQ ID NO: 2087 - DNA, 1350 bp, synthetic construct; identical to SEQ ID NO: 2081
  misc_feature 1..1350: note = Description of Artificial Sequence: Synthetic polynucleotide
  source 1..1350: mol_type = other DNA

SEQ ID NO: 2088 - DNA, 1350 bp, synthetic construct
  misc_feature 1..1350: note = Description of Artificial Sequence: Synthetic polynucleotide
  source 1..1350: mol_type = other DNA
caggtgcaactggtggagtctgggggaggcgtggtccagcctgggaggtccctgagactctcctgtgcagcgtctggattcaccttcagtagctatggcatgcactgggtccgccaggctccaggcaaggggctggagtgggtggcagttatatggtatgatgcaagtaataaatactatgcagactccgtgaagggccgattcaccatctccagggacaattccaagaacacgctgtatctgcaaatgaacagcctgagagccgaggacacggctgtgtattactgtgcgagagataggacgatttttggagtggttcttgactactggggccagggaaccctggtcaccgtctcctcagcctccaccaagggcccatcggtcttccccctggcaccctcctccaagagcacctctgggggcacagcggccctgggctgcctggtcaaggactacttccccgaaccggtgacggtgtcgtggaactcaggcgccctgaccagcggcgtgcacaccttcccggctgtcctacagtcctcaggactctactccctcagcagcgtggtgaccgtgccctccagcagcttgggcacccagacctacatctgcaacgtgaatcacaagcccagcaacaccaaggtggacaagaaagttgagcccaaatcttgtgacaaaactcacacatgcccaccgtgcccagcacctgaactcctggggggaccgtcagtcttcctcttccccccaaaacccaaggacaccctcatgatctcccggacccctgaggtcacatgcgtggtggtggacgtgagccacgaagaccctgaggtcaagttcaactggtacgtggacggcgtggaggtgcataatgccaagacaaagccgtgtgaggagcagtacggcagcacgtaccgttgtgtcagcgtcctcaccgtcctgcaccaggactggctgaatggcaaggagtacaagtgcaaggtctccaacaaagccctcccagcccccatcgagaaaaccatctccaaagccaaagggcagccccgagaaccacaggtgtacaccctgcccccatcccgggaggagatgaccaagaaccaggtcagcctgacctgcctggtcaaaggcttctatcccagcgacatcgccgtggagtgggagagcaatgggcagccggagaacaactacaagaccacgcctcccgtgctggactccgacggctccttcttcctctatagcaagctcaccgtggacaagagcaggtggcagcaggggaacgtcttctcatgctccgtgatgcatgaggctctgcacaaccactacacgcagaagagcctctccctgtctccgggtaaa

SEQ ID NO: 2089 - DNA, 1350 bp, synthetic construct
  misc_feature 1..1350: note = Description of Artificial Sequence: Synthetic polynucleotide
  source 1..1350: mol_type = other DNA
caggtgcaactggtggagtctgggggaggcgtggtccagcctgggaggtccctgagactctcctgtgcagcgtctggattcaccttcagtagctatggcatgcactgggtccgccaggctccaggcaaggggctggagtgggtggcagttatatggtatgatggaagtaataaatactatgcagacgccgtgaagggccgattcaccatctccagggacaattccaagaacacgctgtatctgcaaatgaacagcctgagagccgaggacacggctgtgtattactgtgcgagagataggacgatttttggagtggttcttgactactggggccagggaaccctggtcaccgtctcctcagcctccaccaagggcccatcggtcttccccctggcaccctcctccaagagcacctctgggggcacagcggccctgggctgcctggtcaaggactacttccccgaaccggtgacggtgtcgtggaactcaggcgccctgaccagcggcgtgcacaccttcccggctgtcctacagtcctcaggactctactccctcagcagcgtggtgaccgtgccctccagcagcttgggcacccagacctacatctgcaacgtgaatcacaagcccagcaacaccaaggtggacaagaaagttgagcccaaatcttgtgacaaaactcacacatgcccaccgtgcccagcacctgaactcctggggggaccgtcagtcttcctcttccccccaaaacccaaggacaccctcatgatctcccggacccctgaggtcacatgcgtggtggtggacgtgagccacgaagaccctgaggtcaagttcaactggtacgtggacggcgtggaggtgcataatgccaagacaaagccgtgtgaggagcagtacggcagcacgtaccgttgtgtcagcgtcctcaccgtcctgcaccaggactggctgaatggcaaggagtacaagtgcaaggtctccaacaaagccctcccagcccccatcgagaaaaccatctccaaagccaaagggcagccccgagaaccacaggtgtacaccctgcccccatcccgggaggagatgaccaagaaccaggtcagcctgacctgcctggtcaaaggcttctatcccagcgacatcgccgtggagtgggagagcaatgggcagccggagaacaactacaagaccacgcctcccgtgctggactccgacggctccttcttcctctatagcaagctcaccgtggacaagagcaggtggcagcaggggaacgtcttctcatgctccgtgatgcatgaggctctgcacaaccactacacgcagaagagcctctccctgtctccgggtaaa

SEQ ID NO: 2090 - DNA, 1353 bp, synthetic construct; identical to SEQ ID NO: 2056
  misc_feature 1..1353: note = Description of Artificial Sequence: Synthetic polynucleotide
  source 1..1353: mol_type = other DNA

SEQ ID NO: 2091 - DNA, 1353 bp, synthetic construct; identical to SEQ ID NO: 2061
  misc_feature 1..1353: note = Description of Artificial Sequence: Synthetic polynucleotide
  source 1..1353: mol_type = other DNA

SEQ ID NO: 2092 - DNA, 1353 bp, synthetic construct; identical to SEQ ID NO: 2056
  misc_feature 1..1353: note = Description of Artificial Sequence: Synthetic polynucleotide
  source 1..1353: mol_type = other DNA

SEQ ID NO: 2093 - DNA, 1353 bp, synthetic construct; identical to SEQ ID NO: 2061
  misc_feature 1..1353: note = Description of Artificial Sequence: Synthetic polynucleotide
  source 1..1353: mol_type = other DNA

SEQ ID NO: 2094 - DNA, 1353 bp, synthetic construct; identical to SEQ ID NO: 2044
  misc_feature 1..1353: note = Description of Artificial Sequence: Synthetic polynucleotide
  source 1..1353: mol_type = other DNA

SEQ ID NO: 2095 - DNA, 1353 bp, synthetic construct; identical to SEQ ID NO: 2057
  misc_feature 1..1353: note = Description of Artificial Sequence: Synthetic polynucleotide
  source 1..1353: mol_type = other DNA

SEQ ID NO: 2096 - DNA, 1353 bp, synthetic construct; identical to SEQ ID NO: 2058
  misc_feature 1..1353: note = Description of Artificial Sequence: Synthetic polynucleotide
  source 1..1353: mol_type = other DNA

SEQ ID NO: 2097 - DNA, 1350 bp, synthetic construct
  misc_feature 1..1350: note = Description of Artificial Sequence: Synthetic polynucleotide
  source 1..1350: mol_type = other DNA
caggtgcagctggtggagtctgggggaggcgtggtccagcctgggaggtccctgagactctcctgtgcagcgtctggattctccttcagtagctatggcatgcactgggtccgccagcctccaggcaaggggctggagtgggtggcagctatatggtatgatgcaaataataaatactatgcagacgccgtgaagggccgattcaccatctccagagacagttccaagaacacgctgtatctgcaaatgaacagcctgagagccgaggacacggctgtgtattactgtgcgagagatcggacgatttttggagtggtccttgagtactggggccagggaaccctggtcaccgtctcctcagcctccaccaagggcccatcggtcttccccctggcaccctcctccaagagcacctctgggggcacagcggccctgggctgcctggtcaaggactacttccccgaaccggtgacggtgtcgtggaactcaggcgccctgaccagcggcgtgcacaccttcccggctgtcctacagtcctcaggactctactccctcagcagcgtggtgaccgtgccctccagcagcttgggcacccagacctacatctgcaacgtgaatcacaagcccagcaacaccaaggtggacaagaaagttgagcccaaatcttgtgacaaaactcacacatgcccaccgtgcccagcacctgaactcctggggggaccgtcagtcttcctcttccccccaaaacccaaggacaccctcatgatctcccggacccctgaggtcacatgcgtggtggtggacgtgagccacgaagaccctgaggtcaagttcaactggtacgtggacggcgtggaggtgcataatgccaagacaaagccgtgtgaggagcagtacggcagcacgtaccgttgtgtcagcgtcctcaccgtcctgcaccaggactggctgaatggcaaggagtacaagtgcaaggtctccaacaaagccctcccagcccccatcgagaaaaccatctccaaagccaaagggcagccccgagaaccacaggtgtacaccctgcccccatcccgggaggagatgaccaagaaccaggtcagcctgacctgcctggtcaaaggcttctatcccagcgacatcgccgtggagtgggagagcaatgggcagccggagaacaactacaagaccacgcctcccgtgctggactccgacggctccttcttcctctatagcaagctcaccgtggacaagagcaggtggcagcaggggaacgtcttctcatgctccgtgatgcatgaggctctgcacaaccactacacgcagaagagcctctccctgtctccgggtaaa

SEQ ID NO: 2098 - DNA, 1350 bp, synthetic construct; identical to SEQ ID NO: 2097
  misc_feature 1..1350: note = Description of Artificial Sequence: Synthetic polynucleotide
  source 1..1350: mol_type = other DNA

SEQ ID NO: 2099 - DNA, 1350 bp, synthetic construct
  misc_feature 1..1350: note = Description of Artificial Sequence: Synthetic polynucleotide
  source 1..1350: mol_type = other DNA
caggtgcagctggtggagtctgggggaggcgtggtccagcctgggaggtccctgagactctcctgtgcagcgtctggattctccttcagtagctatggcatgcactgggtccgccagcctccaggcaaggggctggagtgggtggcagctatatggtatgatgcaaataataaatactatgcagacgccgtgaagggccgattcaccatctccagagacagttccaagaacacgctgtatctgcaaatgaacagcctgagagccgaggacacggctgtgtattactgtgcgagagatcggacgatttttggagtggtccttgagtacctcggccagggaaccctggtcaccgtctcctcagcctccaccaagggcccatcggtcttccccctggcaccctcctccaagagcacctctgggggcacagcggccctgggctgcctggtcaaggactacttccccgaaccggtgacggtgtcgtggaactcaggcgccctgaccagcggcgtgcacaccttcccggctgtcctacagtcctcaggactctactccctcagcagcgtggtgaccgtgccctccagcagcttgggcacccagacctacatctgcaacgtgaatcacaagcccagcaacaccaaggtggacaagaaagttgagcccaaatcttgtgacaaaactcacacatgcccaccgtgcccagcacctgaactcctggggggaccgtcagtcttcctcttccccccaaaacccaaggacaccctcatgatctcccggacccctgaggtcacatgcgtggtggtggacgtgagccacgaagaccctgaggtcaagttcaactggtacgtggacggcgtggaggtgcataatgccaagacaaagccgtgtgaggagcagtacggcagcacgtaccgttgtgtcagcgtcctcaccgtcctgcaccaggactggctgaatggcaaggagtacaagtgcaaggtctccaacaaagccctcccagcccccatcgagaaaaccatctccaaagccaaagggcagccccgagaaccacaggtgtacaccctgcccccatcccgggaggagatgaccaagaaccaggtcagcctgacctgcctggtcaaaggcttctatcccagcgacatcgccgtggagtgggagagcaatgggcagccggagaacaactacaagaccacgcctcccgtgctggactccgacggctccttcttcctctatagcaagctcaccgtggacaagagcaggtggcagcaggggaacgtcttctcatgctccgtgatgcatgaggctctgcacaaccactacacgcagaagagcctctccctgtctccgggtaaa

SEQ ID NO: 2100 - DNA, 1350 bp, synthetic construct; identical to SEQ ID NO: 2097
  misc_feature 1..1350: note = Description of Artificial Sequence: Synthetic polynucleotide
  source 1..1350: mol_type = other DNA

SEQ ID NO: 2101 - DNA, 1350 bp, synthetic construct; identical to SEQ ID NO: 2099
  misc_feature 1..1350: note = Description of Artificial Sequence: Synthetic polynucleotide
  source 1..1350: mol_type = other DNA

SEQ ID NO: 2102 - DNA, 1350 bp, synthetic construct; identical to SEQ ID NO: 2099
  misc_feature 1..1350: note = Description of Artificial Sequence: Synthetic polynucleotide
  source 1..1350: mol_type = other DNA

SEQ ID NO: 2103 - DNA, 1350 bp, synthetic construct; identical to SEQ ID NO: 2097
  misc_feature 1..1350: note = Description of Artificial Sequence: Synthetic polynucleotide
  source 1..1350: mol_type = other DNA

SEQ ID NO: 2104 - DNA, 1350 bp, synthetic construct
  misc_feature 1..1350: note = Description of Artificial Sequence: Synthetic polynucleotide
  source 1..1350: mol_type = other DNA
caggtgcagctggtggagtctgggggaggcgtggtccagcctgggaggtccctgagactctcctgtgcagcgtctggattctccttcagtagctatggcatgcactgggtccgccagcctccaggcaaggggctggagtgggtggcagctatatggtatgatggaaataataaatactatgcagacgccgtgaagggccgattcaccatctccagagacagttccaagaacacgctgtatctgcaaatgaacagcctgagagccgaggacacggctgtgtattactgtgcgagagatcggacgatttttggagtggtccttgagtactggggccagggaaccctggtcaccgtctcctcagcctccaccaagggcccatcggtcttccccctggcaccctcctccaagagcacctctgggggcacagcggccctgggctgcctggtcaaggactacttccccgaaccggtgacggtgtcgtggaactcaggcgccctgaccagcggcgtgcacaccttcccggctgtcctacagtcctcaggactctactccctcagcagcgtggtgaccgtgccctccagcagcttgggcacccagacctacatctgcaacgtgaatcacaagcccagcaacaccaaggtggacaagaaagttgagcccaaatcttgtgacaaaactcacacatgcccaccgtgcccagcacctgaactcctggggggaccgtcagtcttcctcttccccccaaaacccaaggacaccctcatgatctcccggacccctgaggtcacatgcgtggtggtggacgtgagccacgaagaccctgaggtcaagttcaactggtacgtggacggcgtggaggtgcataatgccaagacaaagccgtgtgaggagcagtacggcagcacgtaccgttgtgtcagcgtcctcaccgtcctgcaccaggactggctgaatggcaaggagtacaagtgcaaggtctccaacaaagccctcccagcccccatcgagaaaaccatctccaaagccaaagggcagccccgagaaccacaggtgtacaccctgcccccatcccgggaggagatgaccaagaaccaggtcagcctgacctgcctggtcaaaggcttctatcccagcgacatcgccgtggagtgggagagcaatgggcagccggagaacaactacaagaccacgcctcccgtgctggactccgacggctccttcttcctctatagcaagctcaccgtggacaagagcaggtggcagcaggggaacgtcttctcatgctccgtgatgcatgaggctctgcacaaccactacacgcagaagagcctctccctgtctccgggtaaa

SEQ ID NO: 2105 - DNA, 1350 bp, synthetic construct
  misc_feature 1..1350: note = Description of Artificial Sequence: Synthetic polynucleotide
  source 1..1350: mol_type = other DNA
caggtgcagctggtggagtctgggggaggcgtggtccagcctgggaggtccctgagactctcctgtgcagcgtctggattctccttcagtagctatggcatgcactgggtccgccagcctccaggcaaggggctggagtgggtggcagctatatggtatgatgcaaataataaatactatgcagactccgtgaagggccgattcaccatctccagagacagttccaagaacacgctgtatctgcaaatgaacagcctgagagccgaggacacggctgtgtattactgtgcgagagatcggacgatttttggagtggtccttgagtactggggccagggaaccctggtcaccgtctcctcagcctccaccaagggcccatcggtcttccccctggcaccctcctccaagagcacctctgggggcacagcggccctgggctgcctggtcaaggactacttccccgaaccggtgacggtgtcgtggaactcaggcgccctgaccagcggcgtgcacaccttcccggctgtcctacagtcctcaggactctactccctcagcagcgtggtgaccgtgccctccagcagcttgggcacccagacctacatctgcaacgtgaatcacaagcccagcaacaccaaggtggacaagaaagttgagcccaaatcttgtgacaaaactcacacatgcccaccgtgcccagcacctgaactcctggggggaccgtcagtcttcctcttccccccaaaacccaaggacaccctcatgatctcccggacccctgaggtcacatgcgtggtggtggacgtgagccacgaagaccctgaggtcaagttcaactggtacgtggacggcgtggaggtgcataatgccaagacaaagccgtgtgaggagcagtacggcagcacgtaccgttgtgtcagcgtcctcaccgtcctgcaccaggactggctgaatggcaaggagtacaagtgcaaggtctccaacaaagccctcccagcccccatcgagaaaaccatctccaaagccaaagggcagccccgagaaccacaggtgtacaccctgcccccatcccgggaggagatgaccaagaaccaggtcagcctgacctgcctggtcaaaggcttctatcccagcgacatcgccgtggagtgggagagcaatgggcagccggagaacaactacaagaccacgcctcccgtgctggactccgacggctccttcttcctctatagcaagctcaccgtggacaagagcaggtggcagcaggggaacgtcttctcatgctccgtgatgcatgaggctctgcacaaccactacacgcagaagagcctctccctgtctccgggtaaa

SEQ ID NO: 2106 - DNA, 1350 bp, synthetic construct; identical to SEQ ID NO: 2097
  misc_feature 1..1350: note = Description of Artificial Sequence: Synthetic polynucleotide
  source 1..1350: mol_type = other DNA

SEQ ID NO: 2107 - DNA, 1350 bp, synthetic construct; identical to SEQ ID NO: 2099
  misc_feature 1..1350: note = Description of Artificial Sequence: Synthetic polynucleotide
  source 1..1350: mol_type = other DNA

SEQ ID NO: 2108 - DNA, 1350 bp, synthetic construct
  misc_feature 1..1350: note = Description of Artificial Sequence: Synthetic polynucleotide
  source 1..1350: mol_type = other DNA
caggtgcagctggtggagtctgggggaggcgtggtccagcctgggaggtccctgagactctcctgtgcagcgtctggattcagtttcagtagctatggcatgcactgggtccgccaggctccaggcaagggactggagtgggtggcagttatatggtatgatgcaagtaataaatactatgaagacgccgtgaagggccgattcaccatctccagagacaattccaagaacacgctgtttctgcaagtgaacagcctgagagccgaggacacggctgtgtattactgtgcgagagggattacgatttttggtcatgggtttgaatattggggccagggaaccctggtcaccgtctcctcagcctccaccaagggcccatcggtcttccccctggcaccctcctccaagagcacctctgggggcacagcggccctgggctgcctggtcaaggactacttccccgaaccggtgacggtgtcgtggaactcaggcgccctgaccagcggcgtgcacaccttcccggctgtcctacagtcctcaggactctactccctcagcagcgtggtgaccgtgccctccagcagcttgggcacccagacctacatctgcaacgtgaatcacaagcccagcaacaccaaggtggacaagaaagttgagcccaaatcttgtgacaaaactcacacatgcccaccgtgcccagcacctgaactcctggggggaccgtcagtcttcctcttccccccaaaacccaaggacaccctcatgatctcccggacccctgaggtcacatgcgtggtggtggacgtgagccacgaagaccctgaggtcaagttcaactggtacgtggacggcgtggaggtgcataatgccaagacaaagccgtgtgaggagcagtacggcagcacgtaccgttgtgtcagcgtcctcaccgtcctgcaccaggactggctgaatggcaaggagtacaagtgcaaggtctccaacaaagccctcccagcccccatcgagaaaaccatctccaaagccaaagggcagccccgagaaccacaggtgtacaccctgcccccatcccgggaggagatgaccaagaaccaggtcagcctgacctgcctggtcaaaggcttctatcccagcgacatcgccgtggagtgggagagcaatgggcagccggagaacaactacaagaccacgcctcccgtgctggactccgacggctccttcttcctctatagcaagctcaccgtggacaagagcaggtggcagcaggggaacgtcttctcatgctccgtgatgcatgaggctctgcacaaccactacacgcagaagagcctctccctgtctccgggtaaa

SEQ ID NO: 2109 - DNA, 1350 bp, synthetic construct
  misc_feature 1..1350: note = Description of Artificial Sequence: Synthetic polynucleotide
  source 1..1350: mol_type = other DNA
caggtgcagctggtggagtctgggggaggcgtggtccagcctgggaggtccctgagactctcctgtgcagcgtctggattcagtttcagtagctatggcatgcactgggtccgccaggctccaggcaagggactggagtgggtggcagttatatggtatgatggaagtaataaatactatgaagactccgtgaagggccgattcaccatctccagagacaattccaagaacacgctgtttctgcaagtgaacagcctgagagccgaggacacggctgtgtattactgtgcgagagggattacgatttttggtcatgggtttgaatattggggccagggaaccctggtcaccgtctcctcagcctccaccaagggcccatcggtcttccccctggcaccctcctccaagagcacctctgggggcacagcggccctgggctgcctggtcaaggactacttccccgaaccggtgacggtgtcgtggaactcaggcgccctgaccagcggcgtgcacaccttcccggctgtcctacagtcctcaggactctactccctcagcagcgtggtgaccgtgccctccagcagcttgggcacccagacctacatctgcaacgtgaatcacaagcccagcaacaccaaggtggacaagaaagttgagcccaaatcttgtgacaaaactcacacatgcccaccgtgcccagcacctgaactcctggggggaccgtcagtcttcctcttccccccaaaacccaaggacaccctcatgatctcccggacccctgaggtcacatgcgtggtggtggacgtgagccacgaagaccctgaggtcaagttcaactggtacgtggacggcgtggaggtgcataatgccaagacaaagccgtgtgaggagcagtacggcagcacgtaccgttgtgtcagcgtcctcaccgtcctgcaccaggactggctgaatggcaaggagtacaagtgcaaggtctccaacaaagccctcccagcccccatcgagaaaaccatctccaaagccaaagggcagccccgagaaccacaggtgtacaccctgcccccatcccgggaggagatgaccaagaaccaggtcagcctgacctgcctggtcaaaggcttctatcccagcgacatcgccgtggagtgggagagcaatgggcagccggagaacaactacaagaccacgcctcccgtgctggactccgacggctccttcttcctctatagcaagctcaccgtggacaagagcaggtggcagcaggggaacgtcttctcatgctccgtgatgcatgaggctctgcacaaccactacacgcagaagagcctctccctgtctccgggtaaa

SEQ ID NO: 2110 - DNA, 1350 bp, synthetic construct
  misc_feature 1..1350: note = Description of Artificial Sequence: Synthetic polynucleotide
  source 1..1350: mol_type = other DNA
caggtgcagctggtggagtctgggggaggcgtggtccagcctgggaggtccctgagactctcctgtgcagcgtctggattcagtttcagtagctatggcatgcactgggtccgccaggctccaggcaagggactggagtgggtggcagttatatggtatgatggaagtaataaatactatgaagacgccgtgaagggccgattcaccatctccagagacaattccaagaacacgctgtttctgcaagtgaacagcctgagagccgaggacacggctgtgtattactgtgcgagagggattacgatttttggtcatgggtttgaatattggggccagggaaccctggtcaccgtctcctcagcctccaccaagggcccatcggtcttccccctggcaccctcctccaagagcacctctgggggcacagcggccctgggctgcctggtcaaggactacttccccgaaccggtgacggtgtcgtggaactcaggcgccctgaccagcggcgtgcacaccttcccggctgtcctacagtcctcaggactctactccctcagcagcgtggtgaccgtgccctccagcagcttgggcacccagacctacatctgcaacgtgaatcacaagcccagcaacaccaaggtggacaagaaagttgagcccaaatcttgtgacaaaactcacacatgcccaccgtgcccagcacctgaactcctggggggaccgtcagtcttcctcttccccccaaaacccaaggacaccctcatgatctcccggacccctgaggtcacatgcgtggtggtggacgtgagccacgaagaccctgaggtcaagttcaactggtacgtggacggcgtggaggtgcataatgccaagacaaagccgtgtgaggagcagtacggcagcacgtaccgttgtgtcagcgtcctcaccgtcctgcaccaggactggctgaatggcaaggagtacaagtgcaaggtctccaacaaagccctcccagcccccatcgagaaaaccatctccaaagccaaagggcagccccgagaaccacaggtgtacaccctgcccccatcccgggaggagatgaccaagaaccaggtcagcctgacctgcctggtcaaaggcttctatcccagcgacatcgccgtggagtgggagagcaatgggcagccggagaacaactacaagaccacgcctcccgtgctggactccgacggctccttcttcctctatagcaagctcaccgtggacaagagcaggtggcagcaggggaacgtcttctcatgctccgtgatgcatgaggctctgcacaaccactacacgcagaagagcctctccctgtctccgggtaaa

SEQ ID NO: 2111 - DNA, 1350 bp, synthetic construct
  misc_feature 1..1350: note = Description of Artificial Sequence: Synthetic polynucleotide
  source 1..1350: mol_type = other DNA
caggtgcagctggtggagtctgggggaggcgtggtccagcctgggaggtccctgagactctcctgtgcagcgtctggattcagtttcagtagctatggcatgcactgggtccgccaggctccaggcaagggactggagtgggtggcagttatatggtatgatgcaagtaataaatactatgaagactccgtgaagggccgattcaccatctccagagacaattccaagaacacgctgtttctgcaagtgaacagcctgagagccgaggacacggctgtgtattactgtgcgagagggattacgatttttggtcatgggtttgaatattggggccagggaaccctggtcaccgtctcctcagcctccaccaagggcccatcggtcttccccctggcaccctcctccaagagcacctctgggggcacagcggccctgggctgcctggtcaaggactacttccccgaaccggtgacggtgtcgtggaactcaggcgccctgaccagcggcgtgcacaccttcccggctgtcctacagtcctcaggactctactccctcagcagcgtggtgaccgtgccctccagcagcttgggcacccagacctacatctgcaacgtgaatcacaagcccagcaacaccaaggtggacaagaaagttgagcccaaatcttgtgacaaaactcacacatgcccaccgtgcccagcacctgaactcctggggggaccgtcagtcttcctcttccccccaaaacccaaggacaccctcatgatctcccggacccctgaggtcacatgcgtggtggtggacgtgagccacgaagaccctgaggtcaagttcaactggtacgtggacggcgtggaggtgcataatgccaagacaaagccgtgtgaggagcagtacggcagcacgtaccgttgtgtcagcgtcctcaccgtcctgcaccaggactggctgaatggcaaggagtacaagtgcaaggtctccaacaaagccctcccagcccccatcgagaaaaccatctccaaagccaaagggcagccccgagaaccacaggtgtacaccctgcccccatcccgggaggagatgaccaagaaccaggtcagcctgacctgcctggtcaaaggcttctatcccagcgacatcgccgtggagtgggagagcaatgggcagccggagaacaactacaagaccacgcctcccgtgctggactccgacggctccttcttcctctatagcaagctcaccgtggacaagagcaggtggcagcaggggaacgtcttctcatgctccgtgatgcatgaggctctgcacaaccactacacgcagaagagcctctccctgtctccgggtaaa

SEQ ID NO: 2112 - DNA, 1350 bp, synthetic construct
  misc_feature 1..1350: note = Description of Artificial Sequence: Synthetic polynucleotide
  source 1..1350: mol_type = other DNA
caggtgcagctggtggagtctgggggaggcgtggtccagcctgggaggtccctgagactctcctgtgcagcatctggattcaccttcagtaactatggcatgcactgggtccgccaggctccaggcgaggggctggagtgggtggcagctatatggtttgatgcaagtgataaatactatgcagacgccgtgaagggccgattcaccatctccagagacaactccaagaacacgctgtatctgcaaatgaacagcctgagagccgaggacacggctgtgtattactgtgcgagagatcaggcgatttttggagtggtccccgactactggggccagggaaccctggtcaccgtctcctcagcctccaccaagggcccatcggtcttccccctggcaccctcctccaagagcacctctgggggcacagcggccctgggctgcctggtcaaggactacttccccgaaccggtgacggtgtcgtggaactcaggcgccctgaccagcggcgtgcacaccttcccggctgtcctacagtcctcaggactctactccctcagcagcgtggtgaccgtgccctccagcagcttgggcacccagacctacatctgcaacgtgaatcacaagcccagcaacaccaaggtggacaagaaagttgagcccaaatcttgtgacaaaactcacacatgcccaccgtgcccagcacctgaactcctggggggaccgtcagtcttcctcttccccccaaaacccaaggacaccctcatgatctcccggacccctgaggtcacatgcgtggtggtggacgtgagccacgaagaccctgaggtcaagttcaactggtacgtggacggcgtggaggtgcataatgccaagacaaagccgtgtgaggagcagtacggcagcacgtaccgttgtgtcagcgtcctcaccgtcctgcaccaggactggctgaatggcaaggagtacaagtgcaaggtctccaacaaagccctcccagcccccatcgagaaaaccatctccaaagccaaagggcagccccgagaaccacaggtgtacaccctgcccccatcccgggaggagatgaccaagaaccaggtcagcctgacctgcctggtcaaaggcttctatcccagcgacatcgccgtggagtgggagagcaatgggcagccggagaacaactacaagaccacgcctcccgtgctggactccgacggctccttcttcctctatagcaagctcaccgtggacaagagcaggtggcagcaggggaacgtcttctcatgctccgtgatgcatgaggctctgcacaaccactacacgcagaagagcctctccctgtctccgggtaaa

SEQ ID NO: 2113 - DNA, 1350 bp, synthetic construct
  misc_feature 1..1350: note = Description of Artificial Sequence: Synthetic polynucleotide
  source 1..1350: mol_type = other DNA
caggtgcagctggtggagtctgggggaggcgtggtccagcctgggaggtccctgagactctcctgtgcagcatctggattcaccttcagtaactatggcatgcactgggtccgccaggctccaggcgaggggctggagtgggtggcagctatatggtttgatgcaagtgataaatactatgcagactccgtgaagggccgattcaccatctccagagacaactccaagaacacgctgtatctgcaaatgaacagcctgagagccgaggacacggctgtgtattactgtgcgagagatcaggcgatttttggagtggtccccgactactggggccagggaaccctggtcaccgtctcctcagcctccaccaagggcccatcggtcttccccctggcaccctcctccaagagcacctctgggggcacagcggccctgggctgcctggtcaaggactacttccccgaaccggtgacggtgtcgtggaactcaggcgccctgaccagcggcgtgcacaccttcccggctgtcctacagtcctcaggactctactccctcagcagcgtggtgaccgtgccctccagcagcttgggcacccagacctacatctgcaacgtgaatcacaagcccagcaacaccaaggtggacaagaaagttgagcccaaatcttgtgacaaaactcacacatgcccaccgtgcccagcacctgaactcctggggggaccgtcagtcttcctcttccccccaaaacccaaggacaccctcatgatctcccggacccctgaggtcacatgcgtggtggtggacgtgagccacgaagaccctgaggtcaagttcaactggtacgtggacggcgtggaggtgcataatgccaagacaaagccgtgtgaggagcagtacggcagcacgtaccgttgtgtcagcgtcctcaccgtcctgcaccaggactggctgaatggcaaggagtacaagtgcaaggtctccaacaaagccctcccagcccccatcgagaaaaccatctccaaagccaaagggcagccccgagaaccacaggtgtacaccctgcccccatcccgggaggagatgaccaagaaccaggtcagcctgacctgcctggtcaaaggcttctatcccagcgacatcgccgtggagtgggagagcaatgggcagccggagaacaactacaagaccacgcctcccgtgctggactccgacggctccttcttcctctatagcaagctcaccgtggacaagagcaggtggcagcaggggaacgtcttctcatgctccgtgatgcatgaggctctgcacaaccactacacgcagaagagcctctccctgtctccgggtaaa

SEQ ID NO: 2114 - DNA, 1350 bp, synthetic construct
  misc_feature 1..1350: note = Description of Artificial Sequence: Synthetic polynucleotide
  source 1..1350: mol_type = other DNA
caggtgcagctggtggagtctgggggaggcgtggtccagcctgggaggtccctgagactctcctgtgcagcatctggattcaccttcagtaactatggcatgcactgggtccgccaggctccaggcgaggggctggagtgggtggcagctatatggtttgatggaagtgataaatactatgcagacgccgtgaagggccgattcaccatctccagagacaactccaagaacacgctgtatctgcaaatgaacagcctgagagccgaggacacggctgtgtattactgtgcgagagatcaggcgatttttggagtggtccccgactactggggccagggaaccctggtcaccgtctcctcagcctccaccaagggcccatcggtcttccccctggcaccctcctccaagagcacctctgggggcacagcggccctgggctgcctggtcaaggactacttccccgaaccggtgacggtgtcgtggaactcaggcgccctgaccagcggcgtgcacaccttcccggctgtcctacagtcctcaggactctactccctcagcagcgtggtgaccgtgccctccagcagcttgggcacccagacctacatctgcaacgtgaatcacaagcccagcaacaccaaggtggacaagaaagttgagcccaaatcttgtgacaaaactcacacatgcccaccgtgcccagcacctgaactcctggggggaccgtcagtcttcctcttccccccaaaacccaaggacaccctcatgatctcccggacccctgaggtcacatgcgtggtggtggacgtgagccacgaagaccctgaggtcaagttcaactggtacgtggacggcgtggaggtgcataatgccaagacaaagccgtgtgaggagcagtacggcagcacgtaccgttgtgtcagcgtcctcaccgtcctgcaccaggactggctgaatggcaaggagtacaagtgcaaggtctccaacaaagccctcccagcccccatcgagaaaaccatctccaaagccaaagggcagccccgagaaccacaggtgtacaccctgcccccatcccgggaggagatgaccaagaaccaggtcagcctgacctgcctggtcaaaggcttctatcccagcgacatcgccgtggagtgggagagcaatgggcagccggagaacaactacaagaccacgcctcccgtgctggactccgacggctccttcttcctctatagcaagctcaccgtggacaagagcaggtggcagcaggggaacgtcttctcatgctccgtgatgcatgaggctctgcacaaccactacacgcagaagagcctctccctgtctccgggtaaa

SEQ ID NO: 2115 - DNA, 1350 bp, synthetic construct; identical to SEQ ID NO: 2112
  misc_feature 1..1350: note = Description of Artificial Sequence: Synthetic polynucleotide
  source 1..1350: mol_type = other DNA

SEQ ID NO: 2116 - DNA, 1350 bp, synthetic construct
  misc_feature 1..1350: note = Description of Artificial Sequence: Synthetic polynucleotide
  source 1..1350: mol_type = other DNA
caggtgcagctggtggagtctgggggaggcgtggtccagcctgggaggtccctgagactctcctgtgcagcatctggattcaccttcagtaactatggcatgcactgggtccgccaggctccaggcaaggggctggagtgggtggcagctatatggtttgatgcaagtgataaatactatgcagacgccgtgaagggccgattcaccatctccagagacaactccaagaacacgctgtatctgcaaatgaacagcctgagagccgaggacacggctgtgtattactgtgcgagagatcaggcgatttttggagtggtccccgactactggggccagggaaccctggtcaccgtctcctcagcctccaccaagggcccatcggtcttccccctggcaccctcctccaagagcacctctgggggcacagcggccctgggctgcctggtcaaggactacttccccgaaccggtgacggtgtcgtggaactcaggcgccctgaccagcggcgtgcacaccttcccggctgtcctacagtcctcaggactctactccctcagcagcgtggtgaccgtgccctccagcagcttgggcacccagacctacatctgcaacgtgaatcacaagcccagcaacaccaaggtggacaagaaagttgagcccaaatcttgtgacaaaactcacacatgcccaccgtgcccagcacctgaactcctggggggaccgtcagtcttcctcttccccccaaaacccaaggacaccctcatgatctcccggacccctgaggtcacatgcgtggtggtggacgtgagccacgaagaccctgaggtcaagttcaactggtacgtggacggcgtggaggtgcataatgccaagacaaagccgtgtgaggagcagtacggcagcacgtaccgttgtgtcagcgtcctcaccgtcctgcaccaggactggctgaatggcaaggagtacaagtgcaaggtctccaacaaagccctcccagcccccatcgagaaaaccatctccaaagccaaagggcagccccgagaaccacaggtgtacaccctgcccccatcccgggaggagatgaccaagaaccaggtcagcctgacctgcctggtcaaaggcttctatcccagcgacatcgccgtggagtgggagagcaatgggcagccggagaacaactacaagaccacgcctcccgtgctggactccgacggctccttcttcctctatagcaagctcaccgtggacaagagcaggtggcagcaggggaacgtcttctcatgctccgtgatgcatgaggctctgcacaaccactacacgcagaagagcctctccctgtctccgggtaaa

SEQ ID NO: 2117 - DNA, 1350 bp, synthetic construct; identical to SEQ ID NO: 2116
  misc_feature 1..1350: note = Description of Artificial Sequence: Synthetic polynucleotide
  source 1..1350: mol_type = other DNA

SEQ ID NO: 2118 - DNA, 1350 bp, synthetic construct; identical to SEQ ID NO: 2112
  misc_feature 1..1350: note = Description of Artificial Sequence: Synthetic polynucleotide
  source 1..1350: mol_type = other DNA

SEQ ID NO: 2119 - DNA, 1350 bp, synthetic construct; identical to SEQ ID NO: 2116
  misc_feature 1..1350: note = Description of Artificial Sequence: Synthetic polynucleotide
  source 1..1350: mol_type = other DNA

SEQ ID NO: 2120 - DNA, 1368 bp, synthetic construct
  misc_feature 1..1368: note = Description of Artificial Sequence: Synthetic polynucleotide
  source 1..1368: mol_type = other DNA
caggtgcagttgcaggagtcgggcccaggactggtgaagccttcagagaccctgtccctcacctgcactgtctctggtgactccatcagcagtggtggttactactggagctggatccgccagcccccagggaagggcctggagtggattgggtacatctattacagtgggagcacctactacaacccgtccctcaagagtcgagttaccatatcagtagacacgtctaagaaccagttctccctgaagctgagctctgtgactgccgcggacacggccgtgtattactgtgcgagagatcgtattacgatttttggagtggttatggggggcggtatggacgtctggggccaagggaccacggtcaccgtctcctcagcctccaccaagggcccatcggtcttccccctggcaccctcctccaagagcacctctgggggcacagcggccctgggctgcctggtcaaggactacttccccgaaccggtgacggtgtcgtggaactcaggcgccctgaccagcggcgtgcacaccttcccggctgtcctacagtcctcaggactctactccctcagcagcgtggtgaccgtgccctccagcagcttgggcacccagacctacatctgcaacgtgaatcacaagcccagcaacaccaaggtggacaagaaagttgagcccaaatcttgtgacaaaactcacacatgcccaccgtgcccagcacctgaactcctggggggaccgtcagtcttcctcttccccccaaaacccaaggacaccctcatgatctcccggacccctgaggtcacatgcgtggtggtggacgtgagccacgaagaccctgaggtcaagttcaactggtacgtggacggcgtggaggtgcataatgccaagacaaagccgtgtgaggagcagtacggcagcacgtaccgttgtgtcagcgtcctcaccgtcctgcaccaggactggctgaatggcaaggagtacaagtgcaaggtctccaacaaagccctcccagcccccatcgagaaaaccatctccaaagccaaagggcagccccgagaaccacaggtgtacaccctgcccccatcccgggaggagatgaccaagaaccaggtcagcctgacctgcctggtcaaaggcttctatcccagcgacatcgccgtggagtgggagagcaatgggcagccggagaacaactacaagaccacgcctcccgtgctggactccgacggctccttcttcctctatagcaagctcaccgtggacaagagcaggtggcagcaggggaacgtcttctcatgctccgtgatgcatgaggctctgcacaaccactacacgcagaagagcctctccctgtctccgggtaaa

SEQ ID NO: 2121 - DNA, 1368 bp, synthetic construct; identical to SEQ ID NO: 2120
  misc_feature 1..1368: note = Description of Artificial Sequence: Synthetic polynucleotide
  source 1..1368: mol_type = other DNA

SEQ ID NO: 2122 - DNA, 1368 bp, synthetic construct
  misc_feature 1..1368: note = Description of Artificial Sequence: Synthetic polynucleotide
  source 1..1368: mol_type = other DNA
caggtgcagttgcaggagtcgggcccaggactggtgaagccttcacagaccctgtccctcacctgcactgtctctggtgactccatcagcagtggtggttactactggagctggatccgccagcccccagggaagggcctggagtggattgggtacatctattacagtgggagcacctactacaacccgtccctcaagagtcgagttaccatatcagtagacacgtctaagaaccagttctccctgaagctgagctctgtgactgccgcggacacggccgtgtattactgtgcgagagatcgtattacgatttttggagtggttatggggggcggtatggacgtctggggccaagggaccacggtcaccgtctcctcagcctccaccaagggcccatcggtcttccccctggcaccctcctccaagagcacctctgggggcacagcggccctgggctgcctggtcaaggactacttccccgaaccggtgacggtgtcgtggaactcaggcgccctgaccagcggcgtgcacaccttcccggctgtcctacagtcctcaggactctactccctcagcagcgtggtgaccgtgccctccagcagcttgggcacccagacctacatctgcaacgtgaatcacaagcccagcaacaccaaggtggacaagaaagttgagcccaaatcttgtgacaaaactcacacatgcccaccgtgcccagcacctgaactcctggggggaccgtcagtcttcctcttccccccaaaacccaaggacaccctcatgatctcccggacccctgaggtcacatgcgtggtggtggacgtgagccacgaagaccctgaggtcaagttcaactggtacgtggacggcgtggaggtgcataatgccaagacaaagccgtgtgaggagcagtacggcagcacgtaccgttgtgtcagcgtcctcaccgtcctgcaccaggactggctgaatggcaaggagtacaagtgcaaggtctccaacaaagccctcccagcccccatcgagaaaaccatctccaaagccaaagggcagccccgagaaccacaggtgtacaccctgcccccatcccgggaggagatgaccaagaaccaggtcagcctgacctgcctggtcaaaggcttctatcccagcgacatcgccgtggagtgggagagcaatgggcagccggagaacaactacaagaccacgcctcccgtgctggactccgacggctccttcttcctctatagcaagctcaccgtggacaagagcaggtggcagcaggggaacgtcttctcatgctccgtgatgcatgaggctctgcacaaccactacacgcagaagagcctctccctgtctccgggtaaa

SEQ ID NO: 2123 - DNA, 1368 bp, synthetic construct
  misc_feature 1..1368: note = Description of Artificial Sequence: Synthetic polynucleotide
  source 1..1368: mol_type = other DNA
caggtgcagttgcaggagtcgggcccaggactggtgaagccttcagagaccctgtccctcacctgcactgtctctggtgactccatcagcagtggtggttactactggagctggatccgccagcacccagggaagggcctggagtggattgggtacatctattacagtgggagcacctactacaacccgtccctcaagagtcgagttaccatatcagtagacacgtctaagaaccagttctccctgaagctgagctctgtgactgccgcggacacggccgtgtattactgtgcgagagatcgtattacgatttttggagtggttatggggggcggtatggacgtctggggccaagggaccacggtcaccgtctcctcagcctccaccaagggcccatcggtcttccccctggcaccctcctccaagagcacctctgggggcacagcggccctgggctgcctggtcaaggactacttccccgaaccggtgacggtgtcgtggaactcaggcgccctgaccagcggcgtgcacaccttcccggctgtcctacagtcctcaggactctactccctcagcagcgtggtgaccgtgccctccagcagcttgggcacccagacctacatctgcaacgtgaatcacaagcccagcaacaccaaggtggacaagaaagttgagcccaaatcttgtgacaaaactcacacatgcccaccgtgcccagcacctgaactcctggggggaccgtcagtcttcctcttccccccaaaacccaaggacaccctcatgatctcccggacccctgaggtcacatgcgtggtggtggacgtgagccacgaagaccctgaggtcaagttcaactggtacgtggacggcgtggaggtgcataatgccaagacaaagccgtgtgaggagcagtacggcagcacgtaccgttgtgtcagcgtcctcaccgtcctgcaccaggactggctgaatggcaaggagtacaagtgcaaggtctccaacaaagccctcccagcccccatcgagaaaaccatctccaaagccaaagggcagccccgagaaccacaggtgtacaccctgcccccatcccgggaggagatgaccaagaaccaggtcagcctgacctgcctggtcaaaggcttctatcccagcgacatcgccgtggagtgggagagcaatgggcagccggagaacaactacaagaccacgcctcccgtgctggactccgacggctccttcttcctctatagcaagctcaccgtggacaagagcaggtggcagcaggggaacgtcttctcatgctccgtgatgcatgaggctctgcacaaccactacacgcagaagagcctctccctgtctccgggtaaa

SEQ ID NO: 2124 - DNA, 1368 bp, synthetic construct; identical to SEQ ID NO: 2050
  misc_feature 1..1368: note = Description of Artificial Sequence: Synthetic polynucleotide
  source 1..1368: mol_type = other DNA

SEQ ID NO: 2125 - DNA, 1368 bp, synthetic construct; identical to SEQ ID NO: 2123
  misc_feature 1..1368: note = Description of Artificial Sequence: Synthetic polynucleotide
  source 1..1368: mol_type = other DNA

SEQ ID NO: 2126 - DNA, 1368 bp, synthetic construct; identical to SEQ ID NO: 2122
  misc_feature 1..1368: note = Description of Artificial Sequence: Synthetic polynucleotide
  source 1..1368: mol_type = other DNA

SEQ ID NO: 2127 - DNA, 1359 bp, synthetic construct
  misc_feature 1..1359: note = Description of Artificial Sequence: Synthetic polynucleotide
  source 1..1359: mol_type = other DNA
caggtgcagctggtgcagtctggggctgaggtgaagaagcctggggcctcagtgaaggtctcctgcaaggcttctggatacaccttcaccggctactatatccactgggtgcgacaggcccctggacaagggcttgagtggatggggtggatcaaccctgaaagtggtggcacagactattcacagaggtttcagggcagggtcaccatgaccagggacacgtccatcagcacagcctacatggaactgaacaggctgagatctgacgacacggccgtgtattactgtgcgagagaggccacgatttttggaatggttattgtaccgtttgactactggggccagggaaccctggtcaccgtctcctcagcctccaccaagggcccatcggtcttccccctggcaccctcctccaagagcacctctgggggcacagcggccctgggctgcctggtcaaggactacttccccgaaccggtgacggtgtcgtggaactcaggcgccctgaccagcggcgtgcacaccttcccggctgtcctacagtcctcaggactctactccctcagcagcgtggtgaccgtgccctccagcagcttgggcacccagacctacatctgcaacgtgaatcacaagcccagcaacaccaaggtggacaagaaagttgagcccaaatcttgtgacaaaactcacacatgcccaccgtgcccagcacctgaactcctggggggaccgtcagtcttcctcttccccccaaaacccaaggacaccctcatgatctcccggacccctgaggtcacatgcgtggtggtggacgtgagccacgaagaccctgaggtcaagttcaactggtacgtggacggcgtggaggtgcataatgccaagacaaagccgtgtgaggagcagtacggcagcacgtaccgttgtgtcagcgtcctcaccgtcctgcaccaggactggctgaatggcaaggagtacaagtgcaaggtctccaacaaagccctcccagcccccatcgagaaaaccatctccaaagccaaagggcagccccgagaaccacaggtgtacaccctgcccccatcccgggaggagatgaccaagaaccaggtcagcctgacctgcctggtcaaaggcttctatcccagcgacatcgccgtggagtgggagagcaatgggcagccggagaacaactacaagaccacgcctcccgtgctggactccgacggctccttcttcctctatagcaagctcaccgtggacaagagcaggtggcagcaggggaacgtcttctcatgctccgtgatgcatgaggctctgcacaaccactacacgcagaagagcctctccctgtctccgggtaaa

SEQ ID NO: 2128 - DNA, 1359 bp, synthetic construct
  misc_feature 1..1359: note = Description of Artificial Sequence: Synthetic polynucleotide
  source 1..1359: mol_type = other DNA
caggtgccgctggtgcagtctggggctgaggtgaagaagcctggggcctcagtgaaggtctcctgcaaggcttctggatacaccttcaccggctactatatccactgggtgcgacaggcccctggacaagggcttgagtggatggggtggatcaaccctgaaagtggtggcacagactattcacagaggtttcagggcaggttcaccatgaccagggacacgtccatcagcacagcctacatggaactgaacaggctgagatctgacgacacggccgtgtattactgtgcgagagaggccacgatttttggaatggttattgtaccgtttgactactggggccagggaaccctggtcaccgtctcctcagcctccaccaagggcccatcggtcttccccctggcaccctcctccaagagcacctctgggggcacagcggccctgggctgcctggtcaaggactacttccccgaaccggtgacggtgtcgtggaactcaggcgccctgaccagcggcgtgcacaccttcccggctgtcctacagtcctcaggactctactccctcagcagcgtggtgaccgtgccctccagcagcttgggcacccagacctacatctgcaacgtgaatcacaagcccagcaacaccaaggtggacaagaaagttgagcccaaatcttgtgacaaaactcacacatgcccaccgtgcccagcacctgaactcctggggggaccgtcagtcttcctcttccccccaaaacccaaggacaccctcatgatctcccggacccctgaggtcacatgcgtggtggtggacgtgagccacgaagaccctgaggtcaagttcaactggtacgtggacggcgtggaggtgcataatgccaagacaaagccgtgtgaggagcagtacggcagcacgtaccgttgtgtcagcgtcctcaccgtcctgcaccaggactggctgaatggcaaggagtacaagtgcaaggtctccaacaaagccctcccagcccccatcgagaaaaccatctccaaagccaaagggcagccccgagaaccacaggtgtacaccctgcccccatcccgggaggagatgaccaagaaccaggtcagcctgacctgcctggtcaaaggcttctatcccagcgacatcgccgtggagtgggagagcaatgggcagccggagaacaactacaagaccacgcctcccgtgctggactccgacggctccttcttcctctatagcaagctcaccgtggacaagagcaggtggcagcaggggaacgtcttctcatgctccgtgatgcatgaggctctgcacaaccactacacgcagaagagcctctccctgtctccgggtaaa

SEQ ID NO: 2129 - DNA, 1359 bp, synthetic construct
  misc_feature 1..1359: note = Description of Artificial Sequence: Synthetic polynucleotide
  source 1..1359: mol_type = other DNA
caggtgcagctggtgcagtctggggctgaggtgaagaagcctggggcctcagtgaaggtctcctgcaaggcttctggatacaccttcaccggctactatatccactgggtgcgacaggcccctggacaagggcttgagtggatggggtggatcaaccctgacgctggtggcacagactattcacagaggtttcagggcagggtcaccatgaccagggacacgtccatcagcacagcctacatggaactgaacaggctgagatctgacgacacggccgtgtattactgtgcgagagaggccacgatttttggaatggttattgtaccgtttgactactggggccagggaaccctggtcaccgtctcctcagcctccaccaagggcccatcggtcttccccctggcaccctcctccaagagcacctctgggggcacagcggccctgggctgcctggtcaaggactacttccccgaaccggtgacggtgtcgtggaactcaggcgccctgaccagcggcgtgcacaccttcccggctgtcctacagtcctcaggactctactccctcagcagcgtggtgaccgtgccctccagcagcttgggcacccagacctacatctgcaacgtgaatcacaagcccagcaacaccaaggtggacaagaaagttgagcccaaatcttgtgacaaaactcacacatgcccaccgtgcccagcacctgaactcctggggggaccgtcagtcttcctcttccccccaaaacccaaggacaccctcatgatctcccggacccctgaggtcacatgcgtggtggtggacgtgagccacgaagaccctgaggtcaagttcaactggtacgtggacggcgtggaggtgcataatgccaagacaaagccgtgtgaggagcagtacggcagcacgtaccgttgtgtcagcgtcctcaccgtcctgcaccaggactggctgaatggcaaggagtacaagtgcaaggtctccaacaaagccctcccagcccccatcgagaaaaccatctccaaagccaaagggcagccccgagaaccacaggtgtacaccctgcccccatcccgggaggagatgaccaagaaccaggtcagcctgacctgcctggtcaaaggcttctatcccagcgacatcgccgtggagtgggagagcaatgggcagccggagaacaactacaagaccacgcctcccgtgctggactccgacggctccttcttcctctatagcaagctcaccgtggacaagagcaggtggcagcaggggaacgtcttctcatgctccgtgatgcatgaggctctgcacaaccactacacgcagaagagcctctccctgtctccgggtaaa

SEQ ID NO: 2130 - DNA, 1359 bp, synthetic construct
  misc_feature 1..1359: note = Description of Artificial Sequence: Synthetic polynucleotide
  source 1..1359: mol_type = other DNA
caggtgccgctggtgcagtctggggctgaggtgaagaagcctggggcctcagtgaaggtctcctgcaaggcttctggatacaccttcaccggctactatatccactgggtgcgacaggcccctggacaagggcttgagtggatggggtggatcaaccctgacgctggtggcacagactattcacagaggtttcagggcaggttcaccatgaccagggacacgtccatcagcacagcctacatggaactgaacaggctgagatctgacgacacggccgtgtattactgtgcgagagaggccacgatttttggaatggttattgtaccgtttgactactggggccagggaaccctggtcaccgtctcctcagcctccaccaagggcccatcggtcttccccctggcaccctcctccaagagcacctctgggggcacagcggccctgggctgcctggtcaaggactacttccccgaaccggtgacggtgtcgtggaactcaggcgccctgaccagcggcgtgcacaccttcccggctgtcctacagtcctcaggactctactccctcagcagcgtggtgaccgtgccctccagcagcttgggcacccagacctacatctgcaacgtgaatcacaagcccagcaacaccaaggtggacaagaaagttgagcccaaatcttgtgacaaaactcacacatgcccaccgtgcccagcacctgaactcctggggggaccgtcagtcttcctcttccccccaaaacccaaggacaccctcatgatctcccggacccctgaggtcacatgcgtggtggtggacgtgagccacgaagaccctgaggtcaagttcaactggtacgtggacggcgtggaggtgcataatgccaagacaaagccgtgtgaggagcagtacggcagcacgtaccgttgtgtcagcgtcctcaccgtcctgcaccaggactggctgaatggcaaggagtacaagtgcaaggtctccaacaaagccctcccagcccccatcgagaaaaccatctccaaagccaaagggcagccccgagaaccacaggtgtacaccctgcccccatcccgggaggagatgaccaagaaccaggtcagcctgacctgcctggtcaaaggcttctatcccagcgacatcgccgtggagtgggagagcaatgggcagccggagaacaactacaagaccacgcctcccgtgctggactccgacggctccttcttcctctatagcaagctcaccgtggacaagagcaggtggcagcaggggaacgtcttctcatgctccgtgatgcatgaggctctgcacaaccactacacgcagaagagcctctccctgtctccgggtaaa

SEQ ID NO: 2131 - DNA, 1359 bp, synthetic construct
  misc_feature 1..1359: note = Description of Artificial Sequence: Synthetic polynucleotide
  source 1..1359: mol_type = other DNA
caggtgcagctggtgcagtctggggctgaggtgaagaagcctggggcctcagtgaaggtctcctgcaaggcttctggatacaccttcaccggctactatatccactgggtgcgacaggcccctggacaagggcttgagtggatggggtggatcaaccctgacagtggtggcacagactattcacagaggtttcagggcagggtcaccatgaccagggacacgtccatcagcacagcctacatggaactgaacaggctgagatctgacgacacggccgtgtattactgtgcgagagaggccacgatttttggaatggttattgtaccgtttgactactggggccagggaaccctggtcaccgtctcctcagcctccaccaagggcccatcggtcttccccctggcaccctcctccaagagcacctctgggggcacagcggccctgggctgcctggtcaaggactacttccccgaaccggtgacggtgtcgtggaactcaggcgccctgaccagcggcgtgcacaccttcccggctgtcctacagtcctcaggactctactccctcagcagcgtggtgaccgtgccctccagcagcttgggcacccagacctacatctgcaacgtgaatcacaagcccagcaacaccaaggtggacaagaaagttgagcccaaatcttgtgacaaaactcacacatgcccaccgtgcccagcacctgaactcctggggggaccgtcagtcttcctcttccccccaaaacccaaggacaccctcatgatctcccggacccctgaggtcacatgcgtggtggtggacgtgagccacgaagaccctgaggtcaagttcaactggtacgtggacggcgtggaggtgcataatgccaagacaaagccgtgtgaggagcagtacggcagcacgtaccgttgtgtcagcgtcctcaccgtcctgcaccaggactggctgaatggcaaggagtacaagtgcaaggtctccaacaaagccctcccagcccccatcgagaaaaccatctccaaagccaaagggcagccccgagaaccacaggtgtacaccctgcccccatcccgggaggagatgaccaagaaccaggtcagcctgacctgcctggtcaaaggcttctatcccagcgacatcgccgtggagtgggagagcaatgggcagccggagaacaactacaagaccacgcctcccgtgctggactccgacggctccttcttcctctatagcaagctcaccgtggacaagagcaggtggcagcaggggaacgtcttctcatgctccgtgatgcatgaggctctgcacaaccactacacgcagaagagcctctccctgtctccgggtaaa

SEQ ID NO: 2132 - DNA, 1359 bp, synthetic construct
  misc_feature 1..1359: note = Description of Artificial Sequence: Synthetic polynucleotide
  source 1..1359: mol_type = other DNA
caggtgcagctggtgcagtctggggctgaggtgaagaagcctggggcctcagtgaaggtctcctgcaaggcttctggatacaccttcaccggctactatatccactgggtgcgacaggcccctggacaagggcttgagtggatggggtggatcaaccctgacagtggtggcacagactattcacagaggtttcagggcaggttcaccatgaccagggacacgtccatcagcacagcctacatggaactgaacaggctgagatctgacgacacggccgtgtattactgtgcgagagaggccacgatttttggaatggttattgtaccgtttgactactggggccagggaaccctggtcaccgtctcctcagcctccaccaagggcccatcggtcttccccctggcaccctcctccaagagcacctctgggggcacagcggccctgggctgcctggtcaaggactacttccccgaaccggtgacggtgtcgtggaactcaggcgccctgaccagcggcgtgcacaccttcccggctgtcctacagtcctcaggactctactccctcagcagcgtggtgaccgtgccctccagcagcttgggcacccagacctacatctgcaacgtgaatcacaagcccagcaacaccaaggtggacaagaaagttgagcccaaatcttgtgacaaaactcacacatgcccaccgtgcccagcacctgaactcctggggggaccgtcagtcttcctcttccccccaaaacccaaggacaccctcatgatctcccggacccctgaggtcacatgcgtggtggtggacgtgagccacgaagaccctgaggtcaagttcaactggtacgtggacggcgtggaggtgcataatgccaagacaaagccgtgtgaggagcagtacggcagcacgtaccgttgtgtcagcgtcctcaccgtcctgcaccaggactggctgaatggcaaggagtacaagtgcaaggtctccaacaaagccctcccagcccccatcgagaaaaccatctccaaagccaaagggcagccccgagaaccacaggtgtacaccctgcccccatcccgggaggagatgaccaagaaccaggtcagcctgacctgcctggtcaaaggcttctatcccagcgacatcgccgtggagtgggagagcaatgggcagccggagaacaactacaagaccacgcctcccgtgctggactccgacggctccttcttcctctatagcaagctcaccgtggacaagagcaggtggcagcaggggaacgtcttctcatgctccgtgatgcatgaggctctgcacaaccactacacgcagaagagcctctccctgtctccgggtaaa

SEQ ID NO: 2133 - DNA, 1359 bp, synthetic construct
  misc_feature 1..1359: note = Description of Artificial Sequence: Synthetic polynucleotide
  source 1..1359: mol_type = other DNA
caggtgccgctggtgcagtctggggctgaggtgaagaagcctggggcctcagtgaaggtctcctgcaaggcttctggatacaccttcaccggctactatatccactgggtgcgacaggcccctggacaagggcttgagtggatggggtggatcaaccctgacagtggtggcacagactattcacagaggtttcagggcagggtcaccatgaccagggacacgtccatcagcacagcctacatggaactgaacaggctgagatctgacgacacggccgtgtattactgtgcgagagaggccacgatttttggaatggttattgtaccgtttgactactggggccagggaaccctggtcaccgtctcctcagcctccaccaagggcccatcggtcttccccctggcaccctcctccaagagcacctctgggggcacagcggccctgggctgcctggtcaaggactacttccccgaaccggtgacggtgtcgtggaactcaggcgccctgaccagcggcgtgcacaccttcccggctgtcctacagtcctcaggactctactccctcagcagcgtggtgaccgtgccctccagcagcttgggcacccagacctacatctgcaacgtgaatcacaagcccagcaacaccaaggtggacaagaaagttgagcccaaatcttgtgacaaaactcacacatgcccaccgtgcccagcacctgaactcctggggggaccgtcagtcttcctcttccccccaaaacccaaggacaccctcatgatctcccggacccctgaggtcacatgcgtggtggtggacgtgagccacgaagaccctgaggtcaagttcaactggtacgtggacggcgtggaggtgcataatgccaagacaaagccgtgtgaggagcagtacggcagcacgtaccgttgtgtcagcgtcctcaccgtcctgcaccaggactggctgaatggcaaggagtacaagtgcaaggtctccaacaaagccctcccagcccccatcgagaaaaccatctccaaagccaaagggcagccccgagaaccacaggtgtacaccctgcccccatcccgggaggagatgaccaagaaccaggtcagcctgacctgcctggtcaaaggcttctatcccagcgacatcgccgtggagtgggagagcaatgggcagccggagaacaactacaagaccacgcctcccgtgctggactccgacggctccttcttcctctatagcaagctcaccgtggacaagagcaggtggcagcaggggaacgtcttctcatgctccgtgatgcatgaggctctgcacaaccactacacgcagaagagcctctccctgtctccgggtaaa

SEQ ID NO: 2134 - DNA, 1359 bp, synthetic construct
  misc_feature 1..1359: note = Description of Artificial Sequence: Synthetic polynucleotide
  source 1..1359: mol_type = other DNA
caggtgcagctggtgcagtctggggctgaggtgaagaagcctggggcctcagtgaaggtctcctgcaaggcttctggatacaccttcaccggctactatatccactgggtgcgacaggcccctggacaagggcttgagtggatggggtggatcaaccctgacgctggtggcacagactattcacagaggtttcagggcaggttcaccatgaccagggacacgtccatcagcacagcctacatggaactgaacaggctgagatctgacgacacggccgtgtattactgtgcgagagaggccacgatttttggaatggttattgtaccgtttgactactggggccagggaaccctggtcaccgtctcctcagcctccaccaagggcccatcggtcttccccctggcaccctcctccaagagcacctctgggggcacagcggccctgggctgcctggtcaaggactacttccccgaaccggtgacggtgtcgtggaactcaggcgccctgaccagcggcgtgcacaccttcccggctgtcctacagtcctcaggactctactccctcagcagcgtggtgaccgtgccctccagcagcttgggcacccagacctacatctgcaacgtgaatcacaagcccagcaacaccaaggtggacaagaaagttgagcccaaatcttgtgacaaaactcacacatgcccaccgtgcccagcacctgaactcctggggggaccgtcagtcttcctcttccccccaaaacccaaggacaccctcatgatctcccggacccctgaggtcacatgcgtggtggtggacgtgagccacgaagaccctgaggtcaagttcaactggtacgtggacggcgtggaggtgcataatgccaagacaaagccgtgtgaggagcagtacggcagcacgtaccgttgtgtcagcgtcctcaccgtcctgcaccaggactggctgaatggcaaggagtacaagtgcaaggtctccaacaaagccctcccagcccccatcgagaaaaccatctccaaagccaaagggcagccccgagaaccacaggtgtacaccctgcccccatcccgggaggagatgaccaagaaccaggtcagcctgacctgcctggtcaaaggcttctatcccagcgacatcgccgtggagtgggagagcaatgggcagccggagaacaactacaagaccacgcctcccgtgctggactccgacggctccttcttcctctatagcaagctcaccgtggacaagagcaggtggcagcaggggaacgtcttctcatgctccgtgatgcatgaggctctgcacaaccactacacgcagaagagcctctccctgtctccgggtaaa

SEQ ID NO: 2135 - DNA, 1359 bp, synthetic construct
  misc_feature 1..1359: note = Description of Artificial Sequence: Synthetic polynucleotide
  source 1..1359: mol_type = other DNA
caggtgccgctggtgcagtctggggctgaggtgaagaagcctggggcctcagtgaaggtctcctgcaaggcttctggatacaccttcaccggctactatatccactgggtgcgacaggcccctggacaagggcttgagtggatggggtggatcaaccctgacgctggtggcacagactattcacagaggtttcagggcagggtcaccatgaccagggacacgtccatcagcacagcctacatggaactgaacaggctgagatctgacgacacggccgtgtattactgtgcgagagaggccacgatttttggaatggttattgtaccgtttgactactggggccagggaaccctggtcaccgtctcctcagcctccaccaagggcccatcggtcttccccctggcaccctcctccaagagcacctctgggggcacagcggccctgggctgcctggtcaaggactacttccccgaaccggtgacggtgtcgtggaactcaggcgccctgaccagcggcgtgcacaccttcccggctgtcctacagtcctcaggactctactccctcagcagcgtggtgaccgtgccctccagcagcttgggcacccagacctacatctgcaacgtgaatcacaagcccagcaacaccaaggtggacaagaaagttgagcccaaatcttgtgacaaaactcacacatgcccaccgtgcccagcacctgaactcctggggggaccgtcagtcttcctcttccccccaaaacccaaggacaccctcatgatctcccggacccctgaggtcacatgcgtggtggtggacgtgagccacgaagaccctgaggtcaagttcaactggtacgtggacggcgtggaggtgcataatgccaagacaaagccgtgtgaggagcagtacggcagcacgtaccgttgtgtcagcgtcctcaccgtcctgcaccaggactggctgaatggcaaggagtacaagtgcaaggtctccaacaaagccctcccagcccccatcgagaaaaccatctccaaagccaaagggcagccccgagaaccacaggtgtacaccctgcccccatcccgggaggagatgaccaagaaccaggtcagcctgacctgcctggtcaaaggcttctatcccagcgacatcgccgtggagtgggagagcaatgggcagccggagaacaactacaagaccacgcctcccgtgctggactccgacggctccttcttcctctatagcaagctcaccgtggacaagagcaggtggcagcaggggaacgtcttctcatgctccgtgatgcatgaggctctgcacaaccactacacgcagaagagcctctccctgtctccgggtaaa

SEQ ID NO: 2136 - DNA, 1359 bp, synthetic construct
  misc_feature 1..1359: note = Description of Artificial Sequence: Synthetic polynucleotide
  source 1..1359: mol_type = other DNA
caggtgcagctggtgcagtctggggctgaggtgaagaagcctggggcctcagtgaaggtctcctgcaaggcttctggatacaccttcaccggctactatatccactgggtgcgacaggcccctggacaagggcttgagtggatggggtggatcaaccctgacgctggtggcacagactattcacagaggtttcagggcagggtcaccatgaccagggacacgtccatcagcacagcctacatggaactgaacagcctgagatctgacgacacggccgtgtattactgtgcgagagaggccacgatttttggaatggttattgtaccgtttgactactggggccagggaaccctggtcaccgtctcctcagcctccaccaagggcccatcggtcttccccctggcaccctcctccaagagcacctctgggggcacagcggccctgggctgcctggtcaaggactacttccccgaaccggtgacggtgtcgtggaactcaggcgccctgaccagcggcgtgcacaccttcccggctgtcctacagtcctcaggactctactccctcagcagcgtggtgaccgtgccctccagcagcttgggcacccagacctacatctgcaacgtgaatcacaagcccagcaacaccaaggtggacaagaaagttgagcccaaatcttgtgacaaaactcacacatgcccaccgtgcccagcacctgaactcctggggggaccgtcagtcttcctcttccccccaaaacccaaggacaccctcatgatctcccggacccctgaggtcacatgcgtggtggtggacgtgagccacgaagaccctgaggtcaagttcaactggtacgtggacggcgtggaggtgcataatgccaagacaaagccgtgtgaggagcagtacggcagcacgtaccgttgtgtcagcgtcctcaccgtcctgcaccaggactggctgaatggcaaggagtacaagtgcaaggtctccaacaaagccctcccagcccccatcgagaaaaccatctccaaagccaaagggcagccccgagaaccacaggtgtacaccctgcccccatcccgggaggagatgaccaagaaccaggtcagcctgacctgcctggtcaaaggcttctatcccagcgacatcgccgtggagtgggagagcaatgggcagccggagaacaactacaagaccacgcctcccgtgctggactccgacggctccttcttcctctatagcaagctcaccgtggacaagagcaggtggcagcaggggaacgtcttctcatgctccgtgatgcatgaggctctgcacaaccactacacgcagaagagcctctccctgtctccgggtaaa

SEQ ID NO: 2137 - DNA, 1359 bp, synthetic construct
  misc_feature 1..1359: note = Description of Artificial Sequence: Synthetic polynucleotide
  source 1..1359: mol_type = other DNA
caggtgcagctggtgcagtctggggctgaggtgaagaagcctggggcctcagtgaaggtctcctgcaaggcttctggatacaccttcaccggctactatatccactgggtgcgacaggcccctggacaagggcttgagtggatggggtggatcaaccctgaaagtggtggcacagactattcacagaggtttcagggcagggtcaccatgaccagggacacgtccatcagcacagcctacatggaactgaacagcctgagatctgacgacacggccgtgtattactgtgcgagagaggccacgatttttggaatggttattgtaccgtttgactactggggccagggaaccctggtcaccgtctcctcagcctccaccaagggcccatcggtcttccccctggcaccctcctccaagagcacctctgggggcacagcggccctgggctgcctggtcaaggactacttccccgaaccggtgacggtgtcgtggaactcaggcgccctgaccagcggcgtgcacaccttcccggctgtcctacagtcctcaggactctactccctcagcagcgtggtgaccgtgccctccagcagcttgggcacccagacctacatctgcaacgtgaatcacaagcccagcaacaccaaggtggacaagaaagttgagcccaaatcttgtgacaaaactcacacatgcccaccgtgcccagcacctgaactcctggggggaccgtcagtcttcctcttccccccaaaacccaaggacaccctcatgatctcccggacccctgaggtcacatgcgtggtggtggacgtgagccacgaagaccctgaggtcaagttcaactggtacgtggacggcgtggaggtgcataatgccaagacaaagccgtgtgaggagcagtacggcagcacgtaccgttgtgtcagcgtcctcaccgtcctgcaccaggactggctgaatggcaaggagtacaagtgcaaggtctccaacaaagccctcccagcccccatcgagaaaaccatctccaaagccaaagggcagccccgagaaccacaggtgtacaccctgcccccatcccgggaggagatgaccaagaaccaggtcagcctgacctgcctggtcaaaggcttctatcccagcgacatcgccgtggagtgggagagcaatgggcagccggagaacaactacaagaccacgcctcccgtgctggactccgacggctccttcttcctctatagcaagctcaccgtggacaagagcaggtggcagcaggggaacgtcttctcatgctccgtgatgcatgaggctctgcacaaccactacacgcagaagagcctctccctgtctccgggtaaa

SEQ ID NO: 2138 - DNA, 1359 bp, synthetic construct
  misc_feature 1..1359: note = Description of Artificial Sequence: Synthetic polynucleotide
  source 1..1359: mol_type = other DNA
caggtgccgctggtacagtctggggctgaggtgaagaagcctggggcctcagtgaaggtctcctgcaaggcttctggatacaccttcaccggctactatatacactgggtgcgtcaggcccctggacaagggcttgtgtggatggggtggatcagccctaacagtggtgaaacaagctatgcacagaagtttcaggacagggtcaccatgaccagggacacgtccatcagcacagcctatatggagctgagcagactgagatctgacgacacggccgtgtatttctgtgcgagagaggccacgatttttggaatgcttattgtaccatttgactactggggccagggaaccctggtcaccgtctcctcagcctccaccaagggcccatcggtcttccccctggcaccctcctccaagagcacctctgggggcacagcggccctgggctgcctggtcaaggactacttccccgaaccggtgacggtgtcgtggaactcaggcgccctgaccagcggcgtgcacaccttcccggctgtcctacagtcctcaggactctactccctcagcagcgtggtgaccgtgccctccagcagcttgggcacccagacctacatctgcaacgtgaatcacaagcccagcaacaccaaggtggacaagaaagttgagcccaaatcttgtgacaaaactcacacatgcccaccgtgcccagcacctgaactcctggggggaccgtcagtcttcctcttccccccaaaacccaaggacaccctcatgatctcccggacccctgaggtcacatgcgtggtggtggacgtgagccacgaagaccctgaggtcaagttcaactggtacgtggacggcgtggaggtgcataatgccaagacaaagccgtgtgaggagcagtacggcagcacgtaccgttgtgtcagcgtcctcaccgtcctgcaccaggactggctgaatggcaaggagtacaagtgcaaggtctccaacaaagccctcccagcccccatcgagaaaaccatctccaaagccaaagggcagccccgagaaccacaggtgtacaccctgcccccatcccgggaggagatgaccaagaaccaggtcagcctgacctgcctggtcaaaggcttctatcccagcgacatcgccgtggagtgggagagcaatgggcagccggagaacaactacaagaccacgcctcccgtgctggactccgacggctccttcttcctctatagcaagctcaccgtggacaagagcaggtggcagcaggggaacgtcttctcatgctccgtgatgcatgaggctctgcacaaccactacacgcagaagagcctctccctgtctccgggtaaa

SEQ ID NO: 2139 - DNA, 1359 bp, synthetic construct
  misc_feature 1..1359: note = Description of Artificial Sequence: Synthetic polynucleotide
  source 1..1359: mol_type = other DNA
caggtgccgctggtacagtctggggctgaggtgaagaagcctggggcctcagtgaaggtctcctgcaaggcttctggatacaccttcaccggctactatatacactgggtgcgtcaggcccctggacaagggcttgtgtggatggggtggatcagccctaacagtggtgacacaagctatgcacagaagtttcaggacagggtcaccatgaccagggacacgtccatcagcacagcctatatggagctgagcagactgagatctgacgacacggccgtgtatttctgtgcgagagaggccacgatttttggaatgcttattgtaccatttgactactggggccagggaaccctggtcaccgtctcctcagcctccaccaagggcccatcggtcttccccctggcaccctcctccaagagcacctctgggggcacagcggccctgggctgcctggtcaaggactacttccccgaaccggtgacggtgtcgtggaactcaggcgccctgaccagcggcgtgcacaccttcccggctgtcctacagtcctcaggactctactccctcagcagcgtggtgaccgtgccctccagcagcttgggcacccagacctacatctgcaacgtgaatcacaagcccagcaacaccaaggtggacaagaaagttgagcccaaatcttgtgacaaaactcacacatgcccaccgtgcccagcacctgaactcctggggggaccgtcagtcttcctcttccccccaaaacccaaggacaccctcatgatctcccggacccctgaggtcacatgcgtggtggtggacgtgagccacgaagaccctgaggtcaagttcaactggtacgtggacggcgtggaggtgcataatgccaagacaaagccgtgtgaggagcagtacggcagcacgtaccgttgtgtcagcgtcctcaccgtcctgcaccaggactggctgaatggcaaggagtacaagtgcaaggtctccaacaaagccctcccagcccccatcgagaaaaccatctccaaagccaaagggcagccccgagaaccacaggtgtacaccctgcccccatcccgggaggagatgaccaagaaccaggtcagcctgacctgcctggtcaaaggcttctatcccagcgacatcgccgtggagtgggagagcaatgggcagccggagaacaactacaagaccacgcctcccgtgctggactccgacggctccttcttcctctatagcaagctcaccgtggacaagagcaggtggcagcaggggaacgtcttctcatgctccgtgatgcatgaggctctgcacaaccactacacgcagaagagcctctccctgtctccgggtaaa

SEQ ID NO: 2140 - DNA, 1359 bp, synthetic construct; identical to SEQ ID NO: 2138
  misc_feature 1..1359: note = Description of Artificial Sequence: Synthetic polynucleotide
  source 1..1359: mol_type = other DNA

SEQ ID NO: 2141 - DNA, 1359 bp, synthetic construct
  misc_feature 1..1359: note = Description of Artificial Sequence: Synthetic polynucleotide
  source 1..1359: mol_type = other DNA
caggtgccgctggtacagtctggggctgaggtgaagaagcctggggcctcagtgaaggtctcctgcaaggcttctggatacaccttcaccggctactatatacactgggtgcgtcaggcccctggacaagggcttgtgtggatggggtggatcagccctaacagtggtgaaacaagctatgcacagaagtttcaggacagggtcaccatgaccagggacacgtccatcagcacagcctatatggagctgagcagactgagatctgacgacacggccgtgtatttctgtacgagagaggccacgatttttggaatgcttattgtaccatttgactactggggccagggaaccctggtcaccgtctcctcagcctccaccaagggcccatcggtcttccccctggcaccctcctccaagagcacctctgggggcacagcggccctgggctgcctggtcaaggactacttccccgaaccggtgacggtgtcgtggaactcaggcgccctgaccagcggcgtgcacaccttcccggctgtcctacagtcctcaggactctactccctcagcagcgtggtgaccgtgccctccagcagcttgggcacccagacctacatctgcaacgtgaatcacaagcccagcaacaccaaggtggacaagaaagttgagcccaaatcttgtgacaaaactcacacatgcccaccgtgcccagcacctgaactcctggggggaccgtcagtcttcctcttccccccaaaacccaaggacaccctcatgatctcccggacccctgaggtcacatgcgtggtggtggacgtgagccacgaagaccctgaggtcaagttcaactggtacgtggacggcgtggaggtgcataatgccaagacaaagccgtgtgaggagcagtacggcagcacgtaccgttgtgtcagcgtcctcaccgtcctgcaccaggactggctgaatggcaaggagtacaagtgcaaggtctccaacaaagccctcccagcccccatcgagaaaaccatctccaaagccaaagggcagccccgagaaccacaggtgtacaccctgcccccatcccgggaggagatgaccaagaaccaggtcagcctgacctgcctggtcaaaggcttctatcccagcgacatcgccgtggagtgggagagcaatgggcagccggagaacaactacaagaccacgcctcccgtgctggactccgacggctccttcttcctctatagcaagctcaccgtggacaagagcaggtggcagcaggggaacgtcttctcatgctccgtgatgcatgaggctctgcacaaccactacacgcagaagagcctctccctgtctccgggtaaa

SEQ ID NO: 2142 - DNA, 1359 bp, synthetic construct; identical to SEQ ID NO: 2048
  misc_feature 1..1359: note = Description of Artificial Sequence: Synthetic polynucleotide
  source 1..1359: mol_type = other DNA

SEQ ID NO: 2143 - DNA, 1359 bp, synthetic construct; identical to SEQ ID NO: 2141
  misc_feature 1..1359: note = Description of Artificial Sequence: Synthetic polynucleotide
  source 1..1359: mol_type = other DNA

SEQ ID NO: 2144 - DNA, 1359 bp, synthetic construct; identical to SEQ ID NO: 2139
  misc_feature 1..1359: note = Description of Artificial Sequence: Synthetic polynucleotide
  source 1..1359: mol_type = other DNA

SEQ ID NO: 2145 - DNA, 1359 bp, synthetic construct
  misc_feature 1..1359: note = Description of Artificial Sequence: Synthetic polynucleotide
  source 1..1359: mol_type = other DNA
caggtgcagctggtacagtctggggctgaggtgaagaagcctggggcctcagtgaaggtctcctgcaaggcttctggatacaccttcaccggctactatatacactgggtgcgtcaggcccctggacaagggcttgagtggatggggtggatcagccctaacagtggtgaaacaagctatgcacagaagtttcaggacagggtcaccatgaccagggacacgtccatcagcacagcctatatggagctgagcagcctgagatctgacgacacggccgtgtatttctgtgcgagagaggccacgatttttggaatgcttattgtaccatttgactactggggccagggaaccctggtcaccgtctcctcagcctccaccaagggcccatcggtcttccccctggcaccctcctccaagagcacctctgggggcacagcggccctgggctgcctggtcaaggactacttccccgaaccggtgacggtgtcgtggaactcaggcgccctgaccagcggcgtgcacaccttcccggctgtcctacagtcctcaggactctactccctcagcagcgtggtgaccgtgccctccagcagcttgggcacccagacctacatctgcaacgtgaatcacaagcccagcaacaccaaggtggacaagaaagttgagcccaaatcttgtgacaaaactcacacatgcccaccgtgcccagcacctgaactcctggggggaccgtcagtcttcctcttccccccaaaacccaaggacaccctcatgatctcccggacccctgaggtcacatgcgtggtggtggacgtgagccacgaagaccctgaggtcaagttcaactggtacgtggacggcgtggaggtgcataatgccaagacaaagccgtgtgaggagcagtacggcagcacgtaccgttgtgtcagcgtcctcaccgtcctgcaccaggactggctgaatggcaaggagtacaagtgcaaggtctccaacaaagccctcccagcccccatcgagaaaaccatctccaaagccaaagggcagccccgagaaccacaggtgtacaccctgcccccatcccgggaggagatgaccaagaaccaggtcagcctgacctgcctggtcaaaggcttctatcccagcgacatcgccgtggagtgggagagcaatgggcagccggagaacaactacaagaccacgcctcccgtgctggactccgacggctccttcttcctctatagcaagctcaccgtggacaagagcaggtggcagcaggggaacgtcttctcatgctccgtgatgcatgaggctctgcacaaccactacacgcagaagagcctctccctgtctccgggtaaa

SEQ ID NO: 2146 - DNA, 1359 bp, synthetic construct
  misc_feature 1..1359: note = Description of Artificial Sequence: Synthetic polynucleotide
  source 1..1359: mol_type = other DNA
caggtgcagctggtacagtctggggctgaggtgaagaagcctggggcctcagtgaaggtctcctgcaaggcttctggatacaccttcaccggctactatatacactgggtgcgtcaggcccctggacaagggcttgagtggatggggtggatcagccctaacagtggtgaaacaagctatgcacagaagtttcaggacagggtcaccatgaccagggacacgtccatcagcacagcctatatggagctgagcagactgagatctgacgacacggccgtgtatttctgtgcgagagaggccacgatttttggaatgcttattgtaccatttgactactggggccagggaaccctggtcaccgtctcctcagcctccaccaagggcccatcggtcttccccctggcaccctcctccaagagcacctctgggggcacagcggccctgggctgcctggtcaaggactacttccccgaaccggtgacggtgtcgtggaactcaggcgccctgaccagcggcgtgcacaccttcccggctgtcctacagtcctcaggactctactccctcagcagcgtggtgaccgtgccctccagcagcttgggcacccagacctacatctgcaacgtgaatcacaagcccagcaacaccaaggtggacaagaaagttgagcccaaatcttgtgacaaaactcacacatgcccaccgtgcccagcacctgaactcctggggggaccgtcagtcttcctcttccccccaaaacccaaggacaccctcatgatctcccggacccctgaggtcacatgcgtggtggtggacgtgagccacgaagaccctgaggtcaagttcaactggtacgtggacggcgtggaggtgcataatgccaagacaaagccgtgtgaggagcagtacggcagcacgtaccgttgtgtcagcgtcctcaccgtcctgcaccaggactggctgaatggcaaggagtacaagtgcaaggtctccaacaaagccctcccagcccccatcgagaaaaccatctccaaagccaaagggcagccccgagaaccacaggtgtacaccctgcccccatcccgggaggagatgaccaagaaccaggtcagcctgacctgcctggtcaaaggcttctatcccagcgacatcgccgtggagtgggagagcaatgggcagccggagaacaactacaagaccacgcctcccgtgctggactccgacggctccttcttcctctatagcaagctcaccgtggacaagagcaggtggcagcaggggaacgtcttctcatgctccgtgatgcatgaggctctgcacaaccactacacgcagaagagcctctccctgtctccgggtaaa

SEQ ID NO: 2147 - DNA, 1359 bp, synthetic construct
  misc_feature 1..1359: note = Description of Artificial Sequence: Synthetic polynucleotide
  source 1..1359: mol_type = other DNA
caggtgccgctggtgcagtctggggctgaggtgaagaagcctggggcctcagtgaaggtctcctgcaaggcttctggatacaccttcaccggctactatatccactgggtgcgacaggcccctggacaaggacttgagtggatggggtggatcaaccctgaaagtggtggcacagactattcacagaggtttcagggcagggtcaccatgaccagggacacgtccatcagcacagcctacatggaactgagcaggctgagatctgacgacacggccgtgtattactgtgcgagagaggccacgatttttggaatggttattgtaccgtttgactactggggccagggaaccctggtcaccgtctcctcagcctccaccaagggcccatcggtcttccccctggcaccctcctccaagagcacctctgggggcacagcggccctgggctgcctggtcaaggactacttccccgaaccggtgacggtgtcgtggaactcaggcgccctgaccagcggcgtgcacaccttcccggctgtcctacagtcctcaggactctactccctcagcagcgtggtgaccgtgccctccagcagcttgggcacccagacctacatctgcaacgtgaatcacaagcccagcaacaccaaggtggacaagaaagttgagcccaaatcttgtgacaaaactcacacatgcccaccgtgcccagcacctgaactcctggggggaccgtcagtcttcctcttccccccaaaacccaaggacaccctcatgatctcccggacccctgaggtcacatgcgtggtggtggacgtgagccacgaagaccctgaggtcaagttcaactggtacgtggacggcgtggaggtgcataatgccaagacaaagccgtgtgaggagcagtacggcagcacgtaccgttgtgtcagcgtcctcaccgtcctgcaccaggactggctgaatggcaaggagtacaagtgcaaggtctccaacaaagccctcccagcccccatcgagaaaaccatctccaaagccaaagggcagccccgagaaccacaggtgtacaccctgcccccatcccgggaggagatgaccaagaaccaggtcagcctgacctgcctggtcaaaggcttctatcccagcgacatcgccgtggagtgggagagcaatgggcagccggagaacaactacaagaccacgcctcccgtgctggactccgacggctccttcttcctctatagcaagctcaccgtggacaagagcaggtggcagcaggggaacgtcttctcatgctccgtgatgcatgaggctctgcacaaccactacacgcagaagagcctctccctgtctccgggtaaa

SEQ ID NO: 2148 - DNA, 1359 bp, synthetic construct
  misc_feature 1..1359: note = Description of Artificial Sequence: Synthetic polynucleotide
  source 1..1359: mol_type = other DNA
caggtgccgctggtgcagtctggggctgaggtgaagaagcctggggcctcagtgaaggtctcctgcaaggcttctggatacaccttcaccggctactatatccactgggtgcgacaggcccctggacaaggacttgagtggatggggtggatcaaccctgaaagtggtggcacagactattcacagaggtttcagggcaggttcaccatgaccagggacacgtccatcagcacagcctacatggaactgagcaggctgagatctgacgacacggccgtgtattactgtgcgagagaggccacgatttttggaatggttattgtaccgtttgactactggggccagggaaccctggtcaccgtctcctcagcctccaccaagggcccatcggtcttccccctggcaccctcctccaagagcacctctgggggcacagcggccctgggctgcctggtcaaggactacttccccgaaccggtgacggtgtcgtggaactcaggcgccctgaccagcggcgtgcacaccttcccggctgtcctacagtcctcaggactctactccctcagcagcgtggtgaccgtgccctccagcagcttgggcacccagacctacatctgcaacgtgaatcacaagcccagcaacaccaaggtggacaagaaagttgagcccaaatcttgtgacaaaactcacacatgcccaccgtgcccagcacctgaactcctggggggaccgtcagtcttcctcttccccccaaaacccaaggacaccctcatgatctcccggacccctgaggtcacatgcgtggtggtggacgtgagccacgaagaccctgaggtcaagttcaactggtacgtggacggcgtggaggtgcataatgccaagacaaagccgtgtgaggagcagtacggcagcacgtaccgttgtgtcagcgtcctcaccgtcctgcaccaggactggctgaatggcaaggagtacaagtgcaaggtctccaacaaagccctcccagcccccatcgagaaaaccatctccaaagccaaagggcagccccgagaaccacaggtgtacaccctgcccccatcccgggaggagatgaccaagaaccaggtcagcctgacctgcctggtcaaaggcttctatcccagcgacatcgccgtggagtgggagagcaatgggcagccggagaacaactacaagaccacgcctcccgtgctggactccgacggctccttcttcctctatagcaagctcaccgtggacaagagcaggtggcagcaggggaacgtcttctcatgctccgtgatgcatgaggctctgcacaaccactacacgcagaagagcctctccctgtctccgggtaaa

SEQ ID NO: 2149 - DNA, 1359 bp, synthetic construct
  misc_feature 1..1359: note = Description of Artificial Sequence: Synthetic polynucleotide
  source 1..1359: mol_type = other DNA
caggtgccgctggtgcagtctggggctgaggtgaagaagcctggggcctcagtgaaggtctcctgcaaggcttctggatacaccttcaccggctactatatccactgggtgcgacaggcccctggacaaggacttgagtggatggggtggatcaaccctgacagtggtggcacagactattcacagaggtttcagggcagggtcaccatgaccagggacacgtccatcagcacagcctacatggaactgagcaggctgagatctgacgacacggccgtgtattactgtgcgagagaggccacgatttttggaatggttattgtaccgtttgactactggggccagggaaccctggtcaccgtctcctcagcctccaccaagggcccatcggtcttccccctggcaccctcctccaagagcacctctgggggcacagcggccctgggctgcctggtcaaggactacttccccgaaccggtgacggtgtcgtggaactcaggcgccctgaccagcggcgtgcacaccttcccggctgtcctacagtcctcaggactctactccctcagcagcgtggtgaccgtgccctccagcagcttgggcacccagacctacatctgcaacgtgaatcacaagcccagcaacaccaaggtggacaagaaagttgagcccaaatcttgtgacaaaactcacacatgcccaccgtgcccagcacctgaactcctggggggaccgtcagtcttcctcttccccccaaaacccaaggacaccctcatgatctcccggacccctgaggtcacatgcgtggtggtggacgtgagccacgaagaccctgaggtcaagttcaactggtacgtggacggcgtggaggtgcataatgccaagacaaagccgtgtgaggagcagtacggcagcacgtaccgttgtgtcagcgtcctcaccgtcctgcaccaggactggctgaatggcaaggagtacaagtgcaaggtctccaacaaagccctcccagcccccatcgagaaaaccatctccaaagccaaagggcagccccgagaaccacaggtgtacaccctgcccccatcccgggaggagatgaccaagaaccaggtcagcctgacctgcctggtcaaaggcttctatcccagcgacatcgccgtggagtgggagagcaatgggcagccggagaacaactacaagaccacgcctcccgtgctggactccgacggctccttcttcctctatagcaagctcaccgtggacaagagcaggtggcagcaggggaacgtcttctcatgctccgtgatgcatgaggctctgcacaaccactacacgcagaagagcctctccctgtctccgggtaaa

SEQ ID NO: 2150 - DNA, 1359 bp, synthetic construct
  misc_feature 1..1359: note = Description of Artificial Sequence: Synthetic polynucleotide
  source 1..1359: mol_type = other DNA
caggtgcagctggtgcagtctggggctgaggtgaagaagcctggggcctcagtgaaggtctcctgcaaggcttctggatacaccttcaccggctactatatccactgggtgcgacaggcccctggacaaggacttgagtggatggggtggatcaaccctgaaagtggtggcacagactattcacagaggtttcagggcagggtcaccatgaccagggacacgtccatcagcacagcctacatggaactgagcagcctgagatctgacgacacggccgtgtattactgtgcgagagaggccacgatttttggaatggttattgtaccgtttgactactggggccagggaaccctggtcaccgtctcctcagcctccaccaagggcccatcggtcttccccctggcaccctcctccaagagcacctctgggggcacagcggccctgggctgcctggtcaaggactacttccccgaaccggtgacggtgtcgtggaactcaggcgccctgaccagcggcgtgcacaccttcccggctgtcctacagtcctcaggactctactccctcagcagcgtggtgaccgtgccctccagcagcttgggcacccagacctacatctgcaacgtgaatcacaagcccagcaacaccaaggtggacaagaaagttgagcccaaatcttgtgacaaaactcacacatgcccaccgtgcccagcacctgaactcctggggggaccgtcagtcttcctcttccccccaaaacccaaggacaccctcatgatctcccggacccctgaggtcacatgcgtggtggtggacgtgagccacgaagaccctgaggtcaagttcaactggtacgtggacggcgtggaggtgcataatgccaagacaaagccgtgtgaggagcagtacggcagcacgtaccgttgtgtcagcgtcctcaccgtcctgcaccaggactggctgaatggcaaggagtacaagtgcaaggtctccaacaaagccctcccagcccccatcgagaaaaccatctccaaagccaaagggcagccccgagaaccacaggtgtacaccctgcccccatcccgggaggagatgaccaagaaccaggtcagcctgacctgcctggtcaaaggcttctatcccagcgacatcgccgtggagtgggagagcaatgggcagccggagaacaactacaagaccacgcctcccgtgctggactccgacggctccttcttcctctatagcaagctcaccgtggacaagagcaggtggcagcaggggaacgtcttctcatgctccgtgatgcatgaggctctgcacaaccactacacgcagaagagcctctccctgtctccgggtaaa

SEQ ID NO: 2151 - DNA, 1359 bp, synthetic construct; identical to SEQ ID NO: 2147
  misc_feature 1..1359: note = Description of Artificial Sequence: Synthetic polynucleotide
  source 1..1359: mol_type = other DNA

SEQ ID NO: 2152 - DNA, 1359 bp, synthetic construct
  misc_feature 1..1359: note = Description of Artificial Sequence: Synthetic polynucleotide
  source 1..1359: mol_type = other DNA
caggtgccgctggtgcagtctggggctgaggtgaagaagcctggggcctcagtgaaggtctcctgcaaggcttctggatacaccttcaccggctactatatacactgggtgcgtcaggcccctggacaagggcttgagtggatggggtggataagccctaaccaaggtgaaacaaactatgcacagaagtttcaggacagggtcaccatgaccagggacacgtccatcagcacagcctatatggagctgagcaggctgagatctgacgacacggccgtgtattactgtgcgagagaggccacgatttttggaatgcttattgtaccatttgactactggggccagggaaccctggtcaccgtctcctcagcctccaccaagggcccatcggtcttccccctggcaccctcctccaagagcacctctgggggcacagcggccctgggctgcctggtcaaggactacttccccgaaccggtgacggtgtcgtggaactcaggcgccctgaccagcggcgtgcacaccttcccggctgtcctacagtcctcaggactctactccctcagcagcgtggtgaccgtgccctccagcagcttgggcacccagacctacatctgcaacgtgaatcacaagcccagcaacaccaaggtggacaagaaagttgagcccaaatcttgtgacaaaactcacacatgcccaccgtgcccagcacctgaactcctggggggaccgtcagtcttcctcttccccccaaaacccaaggacaccctcatgatctcccggacccctgaggtcacatgcgtggtggtggacgtgagccacgaagaccctgaggtcaagttcaactggtacgtggacggcgtggaggtgcataatgccaagacaaagccgtgtgaggagcagtacggcagcacgtaccgttgtgtcagcgtcctcaccgtcctgcaccaggactggctgaatggcaaggagtacaagtgcaaggtctccaacaaagccctcccagcccccatcgagaaaaccatctccaaagccaaagggcagccccgagaaccacaggtgtacaccctgcccccatcccgggaggagatgaccaagaaccaggtcagcctgacctgcctggtcaaaggcttctatcccagcgacatcgccgtggagtgggagagcaatgggcagccggagaacaactacaagaccacgcctcccgtgctggactccgacggctccttcttcctctatagcaagctcaccgtggacaagagcaggtggcagcaggggaacgtcttctcatgctccgtgatgcatgaggctctgcacaaccactacacgcagaagagcctctccctgtctccgggtaaa

SEQ ID NO: 2153 - DNA, 1359 bp, synthetic construct
  misc_feature 1..1359: note = Description of Artificial Sequence: Synthetic polynucleotide
  source 1..1359: mol_type = other DNA
caggtgccgctggtgcagtctggggctgaggtgaagaagcctggggcctcagtgaaggtctcctgcaaggcttctggatacaccttcaccggctactatatacactgggtgcgtcaggcccctggacaagggcttgagtggatggggtggataagccctaaccaaggtgacacaaactatgcacagaagtttcaggacagggtcaccatgaccagggacacgtccatcagcacagcctatatggagctgagcaggctgagatctgacgacacggccgtgtattactgtgcgagagaggccacgatttttggaatgcttattgtaccatttgactactggggccagggaaccctggtcaccgtctcctcagcctccaccaagggcccatcggtcttccccctggcaccctcctccaagagcacctctgggggcacagcggccctgggctgcctggtcaaggactacttccccgaaccggtgacggtgtcgtggaactcaggcgccctgaccagcggcgtgcacaccttcccggctgtcctacagtcctcaggactctactccctcagcagcgtggtgaccgtgccctccagcagcttgggcacccagacctacatctgcaacgtgaatcacaagcccagcaacaccaaggtggacaagaaagttgagcccaaatcttgtgacaaaactcacacatgcccaccgtgcccagcacctgaactcctggggggaccgtcagtcttcctcttccccccaaaacccaaggacaccctcatgatctcccggacccctgaggtcacatgcgtggtggtggacgtgagccacgaagaccctgaggtcaagttcaactggtacgtggacggcgtggaggtgcataatgccaagacaaagccgtgtgaggagcagtacggcagcacgtaccgttgtgtcagcgtcctcaccgtcctgcaccaggactggctgaatggcaaggagtacaagtgcaaggtctccaacaaagccctcccagcccccatcgagaaaaccatctccaaagccaaagggcagccccgagaaccacaggtgtacaccctgcccccatcccgggaggagatgaccaagaaccaggtcagcctgacctgcctggtcaaaggcttctatcccagcgacatcgccgtggagtgggagagcaatgggcagccggagaacaactacaagaccacgcctcccgtgctggactccgacggctccttcttcctctatagcaagctcaccgtggacaagagcaggtggcagcaggggaacgtcttctcatgctccgtgatgcatgaggctctgcacaaccactacacgcagaagagcctctccctgtctccgggtaaa

SEQ ID NO: 2154 - DNA, 1359 bp, synthetic construct
  misc_feature 1..1359: note = Description of Artificial Sequence: Synthetic polynucleotide
  source 1..1359: mol_type = other DNA
caggtgccgctggtgcagtctggggctgaggtgaagaagcctggggcctcagtgaaggtctcctgcaaggcttctggatacaccttcaccggctactatatacactgggtgcgtcaggcccctggacaagggcttgagtggatggggtggataagccctaaccaaggtgaaacaaactatgcacagaagtttcaggacagggtcaccatgaccagggacacgtccatcagcacagcctatatggagctgagcaggctgagatctgacgacacggccgtgtattactgtacgagagaggccacgatttttggaatgcttattgtaccatttgactactggggccagggaaccctggtcaccgtctcctcagcctccaccaagggcccatcggtcttccccctggcaccctcctccaagagcacctctgggggcacagcggccctgggctgcctggtcaaggactacttccccgaaccggtgacggtgtcgtggaactcaggcgccctgaccagcggcgtgcacaccttcccggctgtcctacagtcctcaggactctactccctcagcagcgtggtgaccgtgccctccagcagcttgggcacccagacctacatctgcaacgtgaatcacaagcccagcaacaccaaggtggacaagaaagttgagcccaaatcttgtgacaaaactcacacatgcccaccgtgcccagcacctgaactcctggggggaccgtcagtcttcctcttccccccaaaacccaaggacaccctcatgatctcccggacccctgaggtcacatgcgtggtggtggacgtgagccacgaagaccctgaggtcaagttcaactggtacgtggacggcgtggaggtgcataatgccaagacaaagccgtgtgaggagcagtacggcagcacgtaccgttgtgtcagcgtcctcaccgtcctgcaccaggactggctgaatggcaaggagtacaagtgcaaggtctccaacaaagccctcccagcccccatcgagaaaaccatctccaaagccaaagggcagccccgagaaccacaggtgtacaccctgcccccatcccgggaggagatgaccaagaaccaggtcagcctgacctgcctggtcaaaggcttctatcccagcgacatcgccgtggagtgggagagcaatgggcagccggagaacaactacaagaccacgcctcccgtgctggactccgacggctccttcttcctctatagcaagctcaccgtggacaagagcaggtggcagcaggggaacgtcttctcatgctccgtgatgcatgaggctctgcacaaccactacacgcagaagagcctctccctgtctccgggtaaa

SEQ ID NO: 2155 - DNA, 1359 bp, synthetic construct
  misc_feature 1..1359: note = Description of Artificial Sequence: Synthetic polynucleotide
  source 1..1359: mol_type = other DNA
caggtgccgctggtgcagtctggggctgaggtgaagaagcctggggcctcagtgaaggtctcctgcaaggcttctggatacaccttcaccggctactatatacactgggtgcgtcaggcccctggacaagggcttgagtggatggggtggataagccctaacaatggtgaaacaaactatgcacagaagtttcaggacagggtcaccatgaccagggacacgtccatcagcacagcctatatggagctgagcaggctgagatctgacgacacggccgtgtattactgtgcgagagaggccacgatttttggaatgcttattgtaccatttgactactggggccagggaaccctggtcaccgtctcctcagcctccaccaagggcccatcggtcttccccctggcaccctcctccaagagcacctctgggggcacagcggccctgggctgcctggtcaaggactacttccccgaaccggtgacggtgtcgtggaactcaggcgccctgaccagcggcgtgcacaccttcccggctgtcctacagtcctcaggactctactccctcagcagcgtggtgaccgtgccctccagcagcttgggcacccagacctacatctgcaacgtgaatcacaagcccagcaacaccaaggtggacaagaaagttgagcccaaatcttgtgacaaaactcacacatgcccaccgtgcccagcacctgaactcctggggggaccgtcagtcttcctcttccccccaaaacccaaggacaccctcatgatctcccggacccctgaggtcacatgcgtggtggtggacgtgagccacgaagaccctgaggtcaagttcaactggtacgtggacggcgtggaggtgcataatgccaagacaaagccgtgtgaggagcagtacggcagcacgtaccgttgtgtcagcgtcctcaccgtcctgcaccaggactggctgaatggcaaggagtacaagtgcaaggtctccaacaaagccctcccagcccccatcgagaaaaccatctccaaagccaaagggcagccccgagaaccacaggtgtacaccctgcccccatcccgggaggagatgaccaagaaccaggtcagcctgacctgcctggtcaaaggcttctatcccagcgacatcgccgtggagtgggagagcaatgggcagccggagaacaactacaagaccacgcctcccgtgctggactccgacggctccttcttcctctatagcaagctcaccgtggacaagagcaggtggcagcaggggaacgtcttctcatgctccgtgatgcatgaggctctgcacaaccactacacgcagaagagcctctccctgtctccgggtaaa

SEQ ID NO: 2156 - DNA, 1359 bp, synthetic construct
  misc_feature 1..1359: note = Description of Artificial Sequence: Synthetic polynucleotide
  source 1..1359: mol_type = other DNA
caggtgccgctggtgcagtctggggctgaggtgaagaagcctggggcctcagtgaaggtctcctgcaaggcttctggatacaccttcaccggctactatatacactgggtgcgtcaggcccctggacaagggcttgagtggatggggtggataagccctaacaatggtgacacaaactatgcacagaagtttcaggacagggtcaccatgaccagggacacgtccatcagcacagcctatatggagctgagcaggctgagatctgacgacacggccgtgtattactgtgcgagagaggccacgatttttggaatgcttattgtaccatttgactactggggccagggaaccctggtcaccgtctcctcagcctccaccaagggcccatcggtcttccccctggcaccctcctccaagagcacctctgggggcacagcggccctgggctgcctggtcaaggactacttccccgaaccggtgacggtgtcgtggaactcaggcgccctgaccagcggcgtgcacaccttcccggctgtcctacagtcctcaggactctactccctcagcagcgtggtgaccgtgccctccagcagcttgggcacccagacctacatctgcaacgtgaatcacaagcccagcaacaccaaggtggacaagaaagttgagcccaaatcttgtgacaaaactcacacatgcccaccgtgcccagcacctgaactcctggggggaccgtcagtcttcctcttccccccaaaacccaaggacaccctcatgatctcccggacccctgaggtcacatgcgtggtggtggacgtgagccacgaagaccctgaggtcaagttcaactggtacgtggacggcgtggaggtgcataatgccaagacaaagccgtgtgaggagcagtacggcagcacgtaccgttgtgtcagcgtcctcaccgtcctgcaccaggactggctgaatggcaaggagtacaagtgcaaggtctccaacaaagccctcccagcccccatcgagaaaaccatctccaaagccaaagggcagccccgagaaccacaggtgtacaccctgcccccatcccgggaggagatgaccaagaaccaggtcagcctgacctgcctggtcaaaggcttctatcccagcgacatcgccgtggagtgggagagcaatgggcagccggagaacaactacaagaccacgcctcccgtgctggactccgacggctccttcttcctctatagcaagctcaccgtggacaagagcaggtggcagcaggggaacgtcttctcatgctccgtgatgcatgaggctctgcacaaccactacacgcagaagagcctctccctgtctccgggtaaa

SEQ ID NO: 2157 - DNA, 1359 bp, synthetic construct
  misc_feature 1..1359: note = Description of Artificial Sequence: Synthetic polynucleotide
  source 1..1359: mol_type = other DNA
caggtgccgctggtgcagtctggggctgaggtgaagaagcctggggcctcagtgaaggtctcctgcaaggcttctggatacaccttcaccggctactatatacactgggtgcgtcaggcccctggacaagggcttgagtggatggggtggataagccctaaccaaggtgacacaaactatgcacagaagtttcaggacagggtcaccatgaccagggacacgtccatcagcacagcctatatggagctgagcaggctgagatctgacgacacggccgtgtattactgtacgagagaggccacgatttttggaatgcttattgtaccatttgactactggggccagggaaccctggtcaccgtctcctcagcctccaccaagggcccatcggtcttccccctggcaccctcctccaagagcacctctgggggcacagcggccctgggctgcctggtcaaggactacttccccgaaccggtgacggtgtcgtggaactcaggcgccctgaccagcggcgtgcacaccttcccggctgtcctacagtcctcaggactctactccctcagcagcgtggtgaccgtgccctccagcagcttgggcacccagacctacatctgcaacgtgaatcacaagcccagcaacaccaaggtggacaagaaagttgagcccaaatcttgtgacaaaactcacacatgcccaccgtgcccagcacctgaactcctggggggaccgtcagtcttcctcttccccccaaaacccaaggacaccctcatgatctcccggacccctgaggtcacatgcgtggtggtggacgtgagccacgaagaccctgaggtcaagttcaactggtacgtggacggcgtggaggtgcataatgccaagacaaagccgtgtgaggagcagtacggcagcacgtaccgttgtgtcagcgtcctcaccgtcctgcaccaggactggctgaatggcaaggagtacaagtgcaaggtctccaacaaagccctcccagcccccatcgagaaaaccatctccaaagccaaagggcagccccgagaaccacaggtgtacaccctgcccccatcccgggaggagatgaccaagaaccaggtcagcctgacctgcctggtcaaaggcttctatcccagcgacatcgccgtggagtgggagagcaatgggcagccggagaacaactacaagaccacgcctcccgtgctggactccgacggctccttcttcctctatagcaagctcaccgtggacaagagcaggtggcagcaggggaacgtcttctcatgctccgtgatgcatgaggctctgcacaaccactacacgcagaagagcctctccctgtctccgggtaaa

SEQ ID NO: 2158 - DNA, 1359 bp, synthetic construct
  misc_feature 1..1359: note = Description of Artificial Sequence: Synthetic polynucleotide
  source 1..1359: mol_type = other DNA
caggtgccgctggtgcagtctggggctgaggtgaagaagcctggggcctcagtgaaggtctcctgcaaggcttctggatacaccttcaccggctactatatacactgggtgcgtcaggcccctggacaagggcttgagtggatggggtggataagccctaacaatggtgaaacaaactatgcacagaagtttcaggacagggtcaccatgaccagggacacgtccatcagcacagcctatatggagctgagcaggctgagatctgacgacacggccgtgtattactgtacgagagaggccacgatttttggaatgcttattgtaccatttgactactggggccagggaaccctggtcaccgtctcctcagcctccaccaagggcccatcggtcttccccctggcaccctcctccaagagcacctctgggggcacagcggccctgggctgcctggtcaaggactacttccccgaaccggtgacggtgtcgtggaactcaggcgccctgaccagcggcgtgcacaccttcccggctgtcctacagtcctcaggactctactccctcagcagcgtggtgaccgtgccctccagcagcttgggcacccagacctacatctgcaacgtgaatcacaagcccagcaacaccaaggtggacaagaaagttgagcccaaatcttgtgacaaaactcacacatgcccaccgtgcccagcacctgaactcctggggggaccgtcagtcttcctcttccccccaaaacccaaggacaccctcatgatctcccggacccctgaggtcacatgcgtggtggtggacgtgagccacgaagaccctgaggtcaagttcaactggtacgtggacggcgtggaggtgcataatgccaagacaaagccgtgtgaggagcagtacggcagcacgtaccgttgtgtcagcgtcctcaccgtcctgcaccaggactggctgaatggcaaggagtacaagtgcaaggtctccaacaaagccctcccagcccccatcgagaaaaccatctccaaagccaaagggcagccccgagaaccacaggtgtacaccctgcccccatcccgggaggagatgaccaagaaccaggtcagcctgacctgcctggtcaaaggcttctatcccagcgacatcgccgtggagtgggagagcaatgggcagccggagaacaactacaagaccacgcctcccgtgctggactccgacggctccttcttcctctatagcaagctcaccgtggacaagagcaggtggcagcaggggaacgtcttctcatgctccgtgatgcatgaggctctgcacaaccactacacgcagaagagcctctccctgtctccgggtaaa

SEQ ID NO: 2159 - DNA, 1359 bp, synthetic construct; identical to SEQ ID NO: 2152
  misc_feature 1..1359: note = Description of Artificial Sequence: Synthetic polynucleotide
  source 1..1359: mol_type = other DNA

SEQ ID NO: 2160 - DNA, 1359 bp, synthetic construct; identical to SEQ ID NO: 2156
  misc_feature 1..1359: note = Description of Artificial Sequence: Synthetic polynucleotide
  source 1..1359: mol_type = other DNA

SEQ ID NO: 2161 - DNA, 1359 bp, synthetic construct; identical to SEQ ID NO: 2153
  misc_feature 1..1359: note = Description of Artificial Sequence: Synthetic polynucleotide
  source 1..1359: mol_type = other DNA

SEQ ID NO: 2162 - DNA, 1359 bp, synthetic construct; identical to SEQ ID NO: 2155
  misc_feature 1..1359: note = Description of Artificial Sequence: Synthetic polynucleotide
  source 1..1359: mol_type = other DNA

SEQ ID NO: 2163 - DNA, 1359 bp, synthetic construct
  misc_feature 1..1359: note = Description of Artificial Sequence: Synthetic polynucleotide
  source 1..1359: mol_type = other DNA
caggtgcagctggtgcagtctggggctgaggtgaagaagcctggggcctcagtgaaggtctcctgcaaggcttctggatacaccttcaccggctactatatacactgggtgcgtcaggcccctggacaagggcttgagtggatggggtggataagccctaaccaaggtgaaacaaactatgcacagaagtttcaggacagggtcaccatgaccagggacacgtccatcagcacagcctatatggagctgagcagcctgagatctgacgacacggccgtgtattactgtgcgagagaggccacgatttttggaatgcttattgtaccatttgactactggggccagggaaccctggtcaccgtctcctcagcctccaccaagggcccatcggtcttccccctggcaccctcctccaagagcacctctgggggcacagcggccctgggctgcctggtcaaggactacttccccgaaccggtgacggtgtcgtggaactcaggcgccctgaccagcggcgtgcacaccttcccggctgtcctacagtcctcaggactctactccctcagcagcgtggtgaccgtgccctccagcagcttgggcacccagacctacatctgcaacgtgaatcacaagcccagcaacaccaaggtggacaagaaagttgagcccaaatcttgtgacaaaactcacacatgcccaccgtgcccagcacctgaactcctggggggaccgtcagtcttcctcttccccccaaaacccaaggacaccctcatgatctcccggacccctgaggtcacatgcgtggtggtggacgtgagccacgaagaccctgaggtcaagttcaactggtacgtggacggcgtggaggtgcataatgccaagacaaagccgtgtgaggagcagtacggcagcacgtaccgttgtgtcagcgtcctcaccgtcctgcaccaggactggctgaatggcaaggagtacaagtgcaaggtctccaacaaagccctcccagcccccatcgagaaaaccatctccaaagccaaagggcagccccgagaaccacaggtgtacaccctgcccccatcccgggaggagatgaccaagaaccaggtcagcctgacctgcctggtcaaaggcttctatcccagcgacatcgccgtggagtgggagagcaatgggcagccggagaacaactacaagaccacgcctcccgtgctggactccgacggctccttcttcctctatagcaagctcaccgtggacaagagcaggtggcagcaggggaacgtcttctcatgctccgtgatgcatgaggctctgcacaaccactacacgcagaagagcctctccctgtctccgggtaaa

SEQ ID NO: 2164 - DNA, 1359 bp, synthetic construct; identical to SEQ ID NO: 2163
  misc_feature 1..1359: note = Description of Artificial Sequence: Synthetic polynucleotide
  source 1..1359: mol_type = other DNA

SEQ ID NO: 2165 - DNA, 1374 bp, synthetic construct; identical to SEQ ID NO: 2042
  misc_feature 1..1374: note = Description of Artificial Sequence: Synthetic polynucleotide
  source 1..1374: mol_type = other DNA

SEQ ID NO: 2166 - DNA, 1374 bp, synthetic construct; identical to SEQ ID NO: 2042
  misc_feature 1..1374: note = Description of Artificial Sequence: Synthetic polynucleotide
  source 1..1374: mol_type = other DNA

SEQ ID NO: 2167 - DNA, 1374 bp, synthetic construct; identical to SEQ ID NO: 2042
  misc_feature 1..1374: note = Description of Artificial Sequence: Synthetic polynucleotide
  source 1..1374: mol_type = other DNA

SEQ ID NO: 2168 - DNA, 1374 bp, synthetic construct; identical to SEQ ID NO: 2042
  misc_feature 1..1374: note = Description of Artificial Sequence: Synthetic polynucleotide
  source 1..1374: mol_type = other DNA

SEQ ID NO: 2169 - DNA, 1374 bp, synthetic construct; identical to SEQ ID NO: 2042
  misc_feature 1..1374: note = Description of Artificial Sequence: Synthetic polynucleotide
  source 1..1374: mol_type = other DNA

SEQ ID NO: 2170 - DNA, 1374 bp, synthetic construct; identical to SEQ ID NO: 2042
  misc_feature 1..1374: note = Description of Artificial Sequence: Synthetic polynucleotide
  source 1..1374: mol_type = other DNA

SEQ ID NO: 2171 - DNA, 1374 bp, synthetic construct; identical to SEQ ID NO: 2042
  misc_feature 1..1374: note = Description of Artificial Sequence: Synthetic polynucleotide
  source 1..1374: mol_type = other DNA

SEQ ID NO: 2172 - DNA, 1374 bp, synthetic construct; identical to SEQ ID NO: 2042
  misc_feature 1..1374: note = Description of Artificial Sequence: Synthetic polynucleotide
  source 1..1374: mol_type = other DNA

SEQ ID NO: 2173 - DNA, 1374 bp, synthetic construct; identical to SEQ ID NO: 2042
  misc_feature 1..1374: note = Description of Artificial Sequence: Synthetic polynucleotide
  source 1..1374: mol_type = other DNA

SEQ ID NO: 2174 - DNA, 1374 bp, synthetic construct; identical to SEQ ID NO: 2042
  misc_feature 1..1374: note = Description of Artificial Sequence: Synthetic polynucleotide
  source 1..1374: mol_type = other DNA

SEQ ID NO: 2175 - DNA, 1374 bp, synthetic construct; identical to SEQ ID NO: 2042
  misc_feature 1..1374: note = Description of Artificial Sequence: Synthetic polynucleotide
  source 1..1374: mol_type = other DNA

SEQ ID NO: 2176 - DNA, 1374 bp, synthetic construct; identical to SEQ ID NO: 2042
  misc_feature 1..1374: note = Description of Artificial Sequence: Synthetic polynucleotide
  source 1..1374: mol_type = other DNA

SEQ ID NO: 2177 - DNA, 1374 bp, synthetic construct
  misc_feature 1..1374: note = Description of Artificial Sequence: Synthetic polynucleotide
  source 1..1374: mol_type = other DNA
cagatgcaggtggtgcagtctggggctgaggtgaagaagcctggggcctcagtgaaggtctcctgcaaggcttccggatacaccttcaccggctactatatgcattgggtgcgacaggcccctggacaagggcttgagtggatgggatggatcaaccctaacagtggtggcacaaactatgcacagaagtttcagggcagggtcaccatgaccagggacacgtccatcagtacagcctacatggagctgagcagcctgaggtctgacgacacggccgtgtattactgtgcgagagggggggattacgttttcgggacttatcggcctcactactactacggtatggacgtctggggccaagggaccacggtcaccgtctcctcagcctccaccaagggcccatcggtcttccccctggcaccctcctccaagagcacctctgggggcacagcggccctgggctgcctggtcaaggactacttccccgaaccggtgacggtgtcgtggaactcaggcgccctgaccagcggcgtgcacaccttcccggctgtcctacagtcctcaggactctactccctcagcagcgtggtgaccgtgccctccagcagcttgggcacccagacctacatctgcaacgtgaatcacaagcccagcaacaccaaggtggacaagaaagttgagcccaaatcttgtgacaaaactcacacatgcccaccgtgcccagcacctgaactcctggggggaccgtcagtcttcctcttccccccaaaacccaaggacaccctcatgatctcccggacccctgaggtcacatgcgtggtggtggacgtgagccacgaagaccctgaggtcaagttcaactggtacgtggacggcgtggaggtgcataatgccaagacaaagccgtgtgaggagcagtacggcagcacgtaccgttgtgtcagcgtcctcaccgtcctgcaccaggactggctgaatggcaaggagtacaagtgcaaggtctccaacaaagccctcccagcccccatcgagaaaaccatctccaaagccaaagggcagccccgagaaccacaggtgtacaccctgcccccatcccgggaggagatgaccaagaaccaggtcagcctgacctgcctggtcaaaggcttctatcccagcgacatcgccgtggagtgggagagcaatgggcagccggagaacaactacaagaccacgcctcccgtgctggactccgacggctccttcttcctctatagcaagctcaccgtggacaagagcaggtggcagcaggggaacgtcttctcatgctccgtgatgcatgaggctctgcacaaccactacacgcagaagagcctctccctgtctccgggtaaa

SEQ ID NO: 2178 - DNA, 1374 bp, synthetic construct
  misc_feature 1..1374: note = Description of Artificial Sequence: Synthetic polynucleotide
  source 1..1374: mol_type = other DNA
cagatgcaggtggtgcagtctggggctgaggtgaagaagcctggggcctcagtgaaggtctcctgcaaggcttccggatacaccttcaccggctactatatgcattgggtgcgacaggcccctggacaagggcttgagtggatgggatggatcaaccctaacagtggtggcacaaactatgcacagaagtttcagggcagggtcaccatgaccagggacacgtccatcagtacagcctacatggagctgagcaggctgaggtctgacgacacggccgtgtattactgtgcgagagggggggattacgttttcgggacttatcggcctcactactactacggtatggacgtctggggccaagggaccacggtcaccgtctcctcagcctccaccaagggcccatcggtcttccccctggcaccctcctccaagagcacctctgggggcacagcggccctgggctgcctggtcaaggactacttccccgaaccggtgacggtgtcgtggaactcaggcgccctgaccagcggcgtgcacaccttcccggctgtcctacagtcctcaggactctactccctcagcagcgtggtgaccgtgccctccagcagcttgggcacccagacctacatctgcaacgtgaatcacaagcccagcaacaccaaggtggacaagaaagttgagcccaaatcttgtgacaaaactcacacatgcccaccgtgcccagcacctgaactcctggggggaccgtcagtcttcctcttccccccaaaacccaaggacaccctcatgatctcccggacccctgaggtcacatgcgtggtggtggacgtgagccacgaagaccctgaggtcaagttcaactggtacgtggacggcgtggaggtgcataatgccaagacaaagccgtgtgaggagcagtacggcagcacgtaccgttgtgtcagcgtcctcaccgtcctgcaccaggactggctgaatggcaaggagtacaagtgcaaggtctccaacaaagccctcccagcccccatcgagaaaaccatctccaaagccaaagggcagccccgagaaccacaggtgtacaccctgcccccatcccgggaggagatgaccaagaaccaggtcagcctgacctgcctggtcaaaggcttctatcccagcgacatcgccgtggagtgggagagcaatgggcagccggagaacaactacaagaccacgcctcccgtgctggactccgacggctccttcttcctctatagcaagctcaccgtggacaagagcaggtggcagcaggggaacgtcttctcatgctccgtgatgcatgaggctctgcacaaccactacacgcagaagagcctctccctgtctccgggtaaa

SEQ ID NO: 2179 - DNA, 1353 bp, synthetic construct; identical to SEQ ID NO: 2079
  misc_feature 1..1353: note = Description of Artificial Sequence: Synthetic polynucleotide
  source 1..1353: mol_type = other DNA

SEQ ID NO: 2180 - DNA, 1353 bp, synthetic construct; identical to SEQ ID NO: 2061
  misc_feature 1..1353: note = Description of Artificial Sequence: Synthetic polynucleotide
  source 1..1353: mol_type = other DNA

SEQ ID NO: 2181 - DNA, 1374 bp, synthetic construct; identical to SEQ ID NO: 2042
  misc_feature 1..1374: note = Description of Artificial Sequence: Synthetic polynucleotide
  source 1..1374: mol_type = other DNA

SEQ ID NO: 2182 - DNA, 1353 bp, synthetic construct
  misc_feature 1..1353: note = Description of Artificial Sequence: Synthetic polynucleotide
  source 1..1353: mol_type = other DNA
caggtgcagttggtggagtctgggggaggcgtggtccagcctgggaggtccctgagactctcctgtacagcgtctggattcaccttcagtagctatggcatacactgggtccgccaggctccaggcaaggggctggagtgggtggcagttatatggtatgatggaagtaataagttccatgcagactccgtgaagggccgattcaccatctccagagacaattccaagaacacgctgtatctgcaaatgaacagcctgagagccgaggactcggctatgtacttctgtgcgagaggaaaagtggctggtatgcctgaagcttttgaaatctggggccaagggacaaaggtcaccgtctcttcagcctccaccaagggcccatcggtcttccccctggcaccctcctccaagagcacctctgggggcacagcggccctgggctgcctggtcaaggactacttccccgaaccggtgacggtgtcgtggaactcaggcgccctgaccagcggcgtgcacaccttcccggctgtcctacagtcctcaggactctactccctcagcagcgtggtgaccgtgccctccagcagcttgggcacccagacctacatctgcaacgtgaatcacaagcccagcaacaccaaggtggacaagaaagttgagcccaaatcttgtgacaaaactcacacatgcccaccgtgcccagcacctgaactcctggggggaccgtcagtcttcctcttccccccaaaacccaaggacaccctcatgatctcccggacccctgaggtcacatgcgtggtggtggacgtgagccacgaagaccctgaggtcaagttcaactggtacgtggacggcgtggaggtgcataatgccaagacaaagccgtgtgaggagcagtacggcagcacgtaccgttgtgtcagcgtcctcaccgtcctgcaccaggactggctgaatggcaaggagtacaagtgcaaggtctccaacaaagccctcccagcccccatcgagaaaaccatctccaaagccaaagggcagccccgagaaccacaggtgtacaccctgcccccatcccgggaggagatgaccaagaaccaggtcagcctgacctgcctggtcaaaggcttctatcccagcgacatcgccgtggagtgggagagcaatgggcagccggagaacaactacaagaccacgcctcccgtgctggactccgacggctccttcttcctctatagcaagctcaccgtggacaagagcaggtggcagcaggggaacgtcttctcatgctccgtgatgcatgaggctctgcacaaccactacacgcagaagagcctctccctgtctccgggtaaa

SEQ ID NO: 2183 - DNA, 1377 bp, synthetic construct
  misc_feature 1..1377: note = Description of Artificial Sequence: Synthetic polynucleotide
  source 1..1377: mol_type = other DNA
caaatgcagctggtgcagtctggggctgaggtgaagaagcctggggcctcagtgaaggtctcctgcaaggcttctggatacaccttcaccagttatgatatcaactgggtgcgacaggccactggacaagggcttgagtggatgggatggatgaaccctaacagtggtaacacaggctatgcacagaagttccagggcagagtcaccatgaccagggacacctccataagcacagcctacatggagctgagcagcctgagatctcaggacacggccgtgtattactgtgcgagagggggtgattacgtttgggggagttatcgtccctactactactactacggtatggacgtctggggccaagggaccacggtcaccgtctcctcagcctccaccaagggcccatcggtcttccccctggcaccctcctccaagagcacctctgggggcacagcggccctgggctgcctggtcaaggactacttccccgaaccggtgacggtgtcgtggaactcaggcgccctgaccagcggcgtgcacaccttcccggctgtcctacagtcctcaggactctactccctcagcagcgtggtgaccgtgccctccagcagcttgggcacccagacctacatctgcaacgtgaatcacaagcccagcaacaccaaggtggacaagaaagttgagcccaaatcttgtgacaaaactcacacatgcccaccgtgcccagcacctgaactcctggggggaccgtcagtcttcctcttccccccaaaacccaaggacaccctcatgatctcccggacccctgaggtcacatgcgtggtggtggacgtgagccacgaagaccctgaggtcaagttcaactggtacgtggacggcgtggaggtgcataatgccaagacaaagccgtgtgaggagcagtacggcagcacgtaccgttgtgtcagcgtcctcaccgtcctgcaccaggactggctgaatggcaaggagtacaagtgcaaggtctccaacaaagccctcccagcccccatcgagaaaaccatctccaaagccaaagggcagccccgagaaccacaggtgtacaccctgcccccatcccgggaggagatgaccaagaaccaggtcagcctgacctgcctggtcaaaggcttctatcccagcgacatcgccgtggagtgggagagcaatgggcagccggagaacaactacaagaccacgcctcccgtgctggactccgacggctccttcttcctctatagcaagctcaccgtggacaagagcaggtggcagcaggggaacgtcttctcatgctccgtgatgcatgaggctctgcacaaccactacacgcagaagagcctctccctgtctccgggtaaa

SEQ ID NO: 2184 - DNA, 1353 bp, synthetic construct
  misc_feature 1..1353: note = Description of Artificial Sequence: Synthetic polynucleotide
  source 1..1353: mol_type = other DNA
caggtgcagttggtggagtctgggggaggcgtggtccagcctgggaggtccctgagactctcctgtgcagcgtctggattcaccttcagtagctatggcatacactgggtccgccaggctccaggcaaggggctggagtgggtggcagttatatggtatgatgcaagtaataagttccatgcagacgccgtgaagggccgattcaccatctccagagacaattccaagaacacgctgtatctgcaaatgaacagcctgagagccgaggactcggctatgtacttctgtgcgagaggaaaagtggctggtatgcctgaagcttttgaaatctggggccaagggacaaaggtcaccgtctcttcagcctccaccaagggcccatcggtcttccccctggcaccctcctccaagagcacctctgggggcacagcggccctgggctgcctggtcaaggactacttccccgaaccggtgacggtgtcgtggaactcaggcgccctgaccagcggcgtgcacaccttcccggctgtcctacagtcctcaggactctactccctcagcagcgtggtgaccgtgccctccagcagcttgggcacccagacctacatctgcaacgtgaatcacaagcccagcaacaccaaggtggacaagaaagttgagcccaaatcttgtgacaaaactcacacatgcccaccgtgcccagcacctgaactcctggggggaccgtcagtcttcctcttccccccaaaacccaaggacaccctcatgatctcccggacccctgaggtcacatgcgtggtggtggacgtgagccacgaagaccctgaggtcaagttcaactggtacgtggacggcgtggaggtgcataatgccaagacaaagccgtgtgaggagcagtacggcagcacgtaccgttgtgtcagcgtcctcaccgtcctgcaccaggactggctgaatggcaaggagtacaagtgcaaggtctccaacaaagccctcccagcccccatcgagaaaaccatctccaaagccaaagggcagccccgagaaccacaggtgtacaccctgcccccatcccgggaggagatgaccaagaaccaggtcagcctgacctgcctggtcaaaggcttctatcccagcgacatcgccgtggagtgggagagcaatgggcagccggagaacaactacaagaccacgcctcccgtgctggactccgacggctccttcttcctctatagcaagctcaccgtggacaagagcaggtggcagcaggggaacgtcttctcatgctccgtgatgcatgaggctctgcacaaccactacacgcagaagagcctctccctgtctccgggtaaa

SEQ ID NO: 2185 - DNA, 1353 bp, synthetic construct
  misc_feature 1..1353: note = Description of Artificial Sequence: Synthetic polynucleotide
  source 1..1353: mol_type = other DNA
caggtgcagttggtggagtctgggggaggcgtggtccagcctgggaggtccctgagactctcctgtacagcgtctggattcaccttcagtagctatggcatacactgggtccgccaggctccaggcaaggggctggagtgggtggcagttatatggtatgatgcaagtaataagttccatgcagacgccgtgaagggccgattcaccatctccagagacaattccaagaacacgctgtatctgcaaatgaacagcctgagagccgaggactcggctatgtacttctgtgcgagaggaaaagtggctggtatgcctgaagcttttgaaatctggggccaagggacaaaggtcaccgtctcttcagcctccaccaagggcccatcggtcttccccctggcaccctcctccaagagcacctctgggggcacagcggccctgggctgcctggtcaaggactacttccccgaaccggtgacggtgtcgtggaactcaggcgccctgaccagcggcgtgcacaccttcccggctgtcctacagtcctcaggactctactccctcagcagcgtggtgaccgtgccctccagcagcttgggcacccagacctacatctgcaacgtgaatcacaagcccagcaacaccaaggtggacaagaaagttgagcccaaatcttgtgacaaaactcacacatgcccaccgtgcccagcacctgaactcctggggggaccgtcagtcttcctcttccccccaaaacccaaggacaccctcatgatctcccggacccctgaggtcacatgcgtggtggtggacgtgagccacgaagaccctgaggtcaagttcaactggtacgtggacggcgtggaggtgcataatgccaagacaaagccgtgtgaggagcagtacggcagcacgtaccgttgtgtcagcgtcctcaccgtcctgcaccaggactggctgaatggcaaggagtacaagtgcaaggtctccaacaaagccctcccagcccccatcgagaaaaccatctccaaagccaaagggcagccccgagaaccacaggtgtacaccctgcccccatcccgggaggagatgaccaagaaccaggtcagcctgacctgcctggtcaaaggcttctatcccagcgacatcgccgtggagtgggagagcaatgggcagccggagaacaactacaagaccacgcctcccgtgctggactccgacggctccttcttcctctatagcaagctcaccgtggacaagagcaggtggcagcaggggaacgtcttctcatgctccgtgatgcatgaggctctgcacaaccactacacgcagaagagcctctccctgtctccgggtaaa

SEQ ID NO: 2186 - DNA, 1353 bp, synthetic construct; identical to SEQ ID NO: 2184
  misc_feature 1..1353: note = Description of Artificial Sequence: Synthetic polynucleotide
  source 1..1353: mol_type = other DNA

SEQ ID NO: 2187 - DNA, 1353 bp, synthetic construct
  misc_feature 1..1353: note = Description of Artificial Sequence: Synthetic polynucleotide
  source 1..1353: mol_type = other DNA
caggtgcagttggtggagtctgggggaggcgtggtccagcctgggaggtccctgagactctcctgtgcagcgtctggattcaccttcagtagctatggcatacactgggtccgccaggctccaggcaaggggctggagtgggtggcagttatatggtatgatgcaagtaataagttccatgcagacgccgtgaagggccgattcaccatctccagagacaattccaagaacacgctgtatctgcaaatgaacagcctgagagccgaggactcggctatgtacttctgtgcgagaggaaaagtggctggtatgcctgaagcttttgaaatctggggccaagggacattggtcaccgtctcttcagcctccaccaagggcccatcggtcttccccctggcaccctcctccaagagcacctctgggggcacagcggccctgggctgcctggtcaaggactacttccccgaaccggtgacggtgtcgtggaactcaggcgccctgaccagcggcgtgcacaccttcccggctgtcctacagtcctcaggactctactccctcagcagcgtggtgaccgtgccctccagcagcttgggcacccagacctacatctgcaacgtgaatcacaagcccagcaacaccaaggtggacaagaaagttgagcccaaatcttgtgacaaaactcacacatgcccaccgtgcccagcacctgaactcctggggggaccgtcagtcttcctcttccccccaaaacccaaggacaccctcatgatctcccggacccctgaggtcacatgcgtggtggtggacgtgagccacgaagaccctgaggtcaagttcaactggtacgtggacggcgtggaggtgcataatgccaagacaaagccgtgtgaggagcagtacggcagcacgtaccgttgtgtcagcgtcctcaccgtcctgcaccaggactggctgaatggcaaggagtacaagtgcaaggtctccaacaaagccctcccagcccccatcgagaaaaccatctccaaagccaaagggcagccccgagaaccacaggtgtacaccctgcccccatcccgggaggagatgaccaagaaccaggtcagcctgacctgcctggtcaaaggcttctatcccagcgacatcgccgtggagtgggagagcaatgggcagccggagaacaactacaagaccacgcctcccgtgctggactccgacggctccttcttcctctatagcaagctcaccgtggacaagagcaggtggcagcaggggaacgtcttctcatgctccgtgatgcatgaggctctgcacaaccactacacgcagaagagcctctccctgtctccgggtaaa

SEQ ID NO: 2188 - DNA, 1353 bp, synthetic construct
  misc_feature 1..1353: note = Description of Artificial Sequence: Synthetic polynucleotide
  source 1..1353: mol_type = other DNA
caggtgcagttggtggagtctgggggaggcgtggtccagcctgggaggtccctgagactctcctgtgcagcgtctggattcaccttcagtagctatggcatacactgggtccgccaggctccaggcaaggggctggagtgggtggcagttatatggtatgatgcaagtaataagttccatgcagactccgtgaagggccgattcaccatctccagagacaattccaagaacacgctgtatctgcaaatgaacagcctgagagccgaggactcggctatgtacttctgtgcgagaggaaaagtggctggtatgcctgaagcttttgaaatctggggccaagggacaaaggtcaccgtctcttcagcctccaccaagggcccatcggtcttccccctggcaccctcctccaagagcacctctgggggcacagcggccctgggctgcctggtcaaggactacttccccgaaccggtgacggtgtcgtggaactcaggcgccctgaccagcggcgtgcacaccttcccggctgtcctacagtcctcaggactctactccctcagcagcgtggtgaccgtgccctccagcagcttgggcacccagacctacatctgcaacgtgaatcacaagcccagcaacaccaaggtggacaagaaagttgagcccaaatcttgtgacaaaactcacacatgcccaccgtgcccagcacctgaactcctggggggaccgtcagtcttcctcttccccccaaaacccaaggacaccctcatgatctcccggacccctgaggtcacatgcgtggtggtggacgtgagccacgaagaccctgaggtcaagttcaactggtacgtggacggcgtggaggtgcataatgccaagacaaagccgtgtgaggagcagtacggcagcacgtaccgttgtgtcagcgtcctcaccgtcctgcaccaggactggctgaatggcaaggagtacaagtgcaaggtctccaacaaagccctcccagcccccatcgagaaaaccatctccaaagccaaagggcagccccgagaaccacaggtgtacaccctgcccccatcccgggaggagatgaccaagaaccaggtcagcctgacctgcctggtcaaaggcttctatcccagcgacatcgccgtggagtgggagagcaatgggcagccggagaacaactacaagaccacgcctcccgtgctggactccgacggctccttcttcctctatagcaagctcaccgtggacaagagcaggtggcagcaggggaacgtcttctcatgctccgtgatgcatgaggctctgcacaaccactacacgcagaagagcctctccctgtctccgggtaaa

SEQ ID NO: 2189 - DNA, 1353 bp, synthetic construct
  misc_feature 1..1353: note = Description of Artificial Sequence: Synthetic polynucleotide
  source 1..1353: mol_type = other DNA
caggtgcagttggtggagtctgggggaggcgtggtccagcctgggaggtccctgagactctcctgtgcagcgtctggattcaccttcagtagctatggcatacactgggtccgccaggctccaggcaaggggctggagtgggtggcagttatatggtatgatggaagtaataagttccatgcagacgccgtgaagggccgattcaccatctccagagacaattccaagaacacgctgtatctgcaaatgaacagcctgagagccgaggactcggctatgtacttctgtgcgagaggaaaagtggctggtatgcctgaagcttttgaaatctggggccaagggacaaaggtcaccgtctcttcagcctccaccaagggcccatcggtcttccccctggcaccctcctccaagagcacctctgggggcacagcggccctgggctgcctggtcaaggactacttccccgaaccggtgacggtgtcgtggaactcaggcgccctgaccagcggcgtgcacaccttcccggctgtcctacagtcctcaggactctactccctcagcagcgtggtgaccgtgccctccagcagcttgggcacccagacctacatctgcaacgtgaatcacaagcccagcaacaccaaggtggacaagaaagttgagcccaaatcttgtgacaaaactcacacatgcccaccgtgcccagcacctgaactcctggggggaccgtcagtcttcctcttccccccaaaacccaaggacaccctcatgatctcccggacccctgaggtcacatgcgtggtggtggacgtgagccacgaagaccctgaggtcaagttcaactggtacgtggacggcgtggaggtgcataatgccaagacaaagccgtgtgaggagcagtacggcagcacgtaccgttgtgtcagcgtcctcaccgtcctgcaccaggactggctgaatggcaaggagtacaagtgcaaggtctccaacaaagccctcccagcccccatcgagaaaaccatctccaaagccaaagggcagccccgagaaccacaggtgtacaccctgcccccatcccgggaggagatgaccaagaaccaggtcagcctgacctgcctggtcaaaggcttctatcccagcgacatcgccgtggagtgggagagcaatgggcagccggagaacaactacaagaccacgcctcccgtgctggactccgacggctccttcttcctctatagcaagctcaccgtggacaagagcaggtggcagcaggggaacgtcttctcatgctccgtgatgcatgaggctctgcacaaccactacacgcagaagagcctctccctgtctccgggtaaa

SEQ ID NO: 2190 - DNA, 1377 bp, synthetic construct
  misc_feature 1..1377: note = Description of Artificial Sequence: Synthetic polynucleotide
  source 1..1377: mol_type = other DNA
caaatgcagctggtgcagtctggggctgaggtgaagaagcctggggcctcagtgaaggtctcctgcaaggcttctggatacaccttcaccagttatgatatcaactgggtgcgacaggccactggacaagggcttgagtggatgggatggatgaaccctaacagtggtggcacaggctatgcacagaagttccagggcagagtcaccatgaccagggacacctccataagcacagcctacatggagctgagcagcctgagatctcaggacacggccgtgtattactgtgcgagagggggtgattacgtttgggggagttatcgtccctactactactactacggtatggacgtctggggccaagggaccacggtcaccgtctcctcagcctccaccaagggcccatcggtcttccccctggcaccctcctccaagagcacctctgggggcacagcggccctgggctgcctggtcaaggactacttccccgaaccggtgacggtgtcgtggaactcaggcgccctgaccagcggcgtgcacaccttcccggctgtcctacagtcctcaggactctactccctcagcagcgtggtgaccgtgccctccagcagcttgggcacccagacctacatctgcaacgtgaatcacaagcccagcaacaccaaggtggacaagaaagttgagcccaaatcttgtgacaaaactcacacatgcccaccgtgcccagcacctgaactcctggggggaccgtcagtcttcctcttccccccaaaacccaaggacaccctcatgatctcccggacccctgaggtcacatgcgtggtggtggacgtgagccacgaagaccctgaggtcaagttcaactggtacgtggacggcgtggaggtgcataatgccaagacaaagccgtgtgaggagcagtacggcagcacgtaccgttgtgtcagcgtcctcaccgtcctgcaccaggactggctgaatggcaaggagtacaagtgcaaggtctccaacaaagccctcccagcccccatcgagaaaaccatctccaaagccaaagggcagccccgagaaccacaggtgtacaccctgcccccatcccgggaggagatgaccaagaaccaggtcagcctgacctgcctggtcaaaggcttctatcccagcgacatcgccgtggagtgggagagcaatgggcagccggagaacaactacaagaccacgcctcccgtgctggactccgacggctccttcttcctctatagcaagctcaccgtggacaagagcaggtggcagcaggggaacgtcttctcatgctccgtgatgcatgaggctctgcacaaccactacacgcagaagagcctctccctgtctccgggtaaa

SEQ ID NO: 2191 - DNA, 1377 bp, synthetic construct; identical to SEQ ID NO: 2183
  misc_feature 1..1377: note = Description of Artificial Sequence: Synthetic polynucleotide
  source 1..1377: mol_type = other DNA

SEQ ID NO: 2192 - DNA, 1377 bp, synthetic construct; identical to SEQ ID NO: 2190
  misc_feature 1..1377: note = Description of Artificial Sequence: Synthetic polynucleotide
  source 1..1377: mol_type = other DNA

SEQ ID NO: 2193 - DNA, 1377 bp, synthetic construct
  misc_feature 1..1377: note = Description of Artificial Sequence: Synthetic polynucleotide
  source 1..1377: mol_type = other DNA
caaatgcagctggtgcagtctggggctgaggtgaagaagcctggggcctcagtgaaggtctcctgcaaggcttctggatacaccttcaccagttatgatatcaactgggtgcgacaggcccctggacaagggcttgagtggatgggatggatgaaccctaacagtggtggcacaggctatgcacagaagttccagggcagagtcaccatgaccagggacacctccataagcacagcctacatggagctgagcagcctgagatctgacgacacggccgtgtattactgtgcgagagggggtgattacgtttgggggagttatcgtccctactactactactacggtatggacgtctggggccaagggaccacggtcaccgtctcctcagcctccaccaagggcccatcggtcttccccctggcaccctcctccaagagcacctctgggggcacagcggccctgggctgcctggtcaaggactacttccccgaaccggtgacggtgtcgtggaactcaggcgccctgaccagcggcgtgcacaccttcccggctgtcctacagtcctcaggactctactccctcagcagcgtggtgaccgtgccctccagcagcttgggcacccagacctacatctgcaacgtgaatcacaagcccagcaacaccaaggtggacaagaaagttgagcccaaatcttgtgacaaaactcacacatgcccaccgtgcccagcacctgaactcctggggggaccgtcagtcttcctcttccccccaaaacccaaggacaccctcatgatctcccggacccctgaggtcacatgcgtggtggtggacgtgagccacgaagaccctgaggtcaagttcaactggtacgtggacggcgtggaggtgcataatgccaagacaaagccgtgtgaggagcagtacggcagcacgtaccgttgtgtcagcgtcctcaccgtcctgcaccaggactggctgaatggcaaggagtacaagtgcaaggtctccaacaaagccctcccagcccccatcgagaaaaccatctccaaagccaaagggcagccccgagaaccacaggtgtacaccctgcccccatcccgggaggagatgaccaagaaccaggtcagcctgacctgcctggtcaaaggcttctatcccagcgacatcgccgtggagtgggagagcaatgggcagccggagaacaactacaagaccacgcctcccgtgctggactccgacggctccttcttcctctatagcaagctcaccgtggacaagagcaggtggcagcaggggaacgtcttctcatgctccgtgatgcatgaggctctgcacaaccactacacgcagaagagcctctccctgtctccgggtaaa

SEQ ID NO: 2194 - DNA, 1377 bp, synthetic construct; identical to SEQ ID NO: 2190
  misc_feature 1..1377: note = Description of Artificial Sequence: Synthetic polynucleotide
  source 1..1377: mol_type = other DNA

SEQ ID NO: 2195 - DNA, 1377 bp, synthetic construct
  misc_feature 1..1377: note = Description of Artificial Sequence: Synthetic polynucleotide
  source 1..1377: mol_type = other DNA
caaatgcagctggtgcagtctggggctgaggtgaagaagcctggggcctcagtgaaggtctcctgcaaggcttctggatacaccttcaccagttatgatatcaactgggtgcgacaggcccctggacaagggcttgagtggatgggatggatgaaccctaacagtggtaacacaggctatgcacagaagttccagggcagagtcaccatgaccagggacacctccataagcacagcctacatggagctgagcagcctgagatctgacgacacggccgtgtattactgtgcgagagggggtgattacgtttgggggagttatcgtccctactactactactacggtatggacgtctggggccaagggaccacggtcaccgtctcctcagcctccaccaagggcccatcggtcttccccctggcaccctcctccaagagcacctctgggggcacagcggccctgggctgcctggtcaaggactacttccccgaaccggtgacggtgtcgtggaactcaggcgccctgaccagcggcgtgcacaccttcccggctgtcctacagtcctcaggactctactccctcagcagcgtggtgaccgtgccctccagcagcttgggcacccagacctacatctgcaacgtgaatcacaagcccagcaacaccaaggtggacaagaaagttgagcccaaatcttgtgacaaaactcacacatgcccaccgtgcccagcacctgaactcctggggggaccgtcagtcttcctcttccccccaaaacccaaggacaccctcatgatctcccggacccctgaggtcacatgcgtggtggtggacgtgagccacgaagaccctgaggtcaagttcaactggtacgtggacggcgtggaggtgcataatgccaagacaaagccgtgtgaggagcagtacggcagcacgtaccgttgtgtcagcgtcctcaccgtcctgcaccaggactggctgaatggcaaggagtacaagtgcaaggtctccaacaaagccctcccagcccccatcgagaaaaccatctccaaagccaaagggcagccccgagaaccacaggtgtacaccctgcccccatcccgggaggagatgaccaagaaccaggtcagcctgacctgcctggtcaaaggcttctatcccagcgacatcgccgtggagtgggagagcaatgggcagccggagaacaactacaagaccacgcctcccgtgctggactccgacggctccttcttcctctatagcaagctcaccgtggacaagagcaggtggcagcaggggaacgtcttctcatgctccgtgatgcatgaggctctgcacaaccactacacgcagaagagcctctccctgtctccgggtaaa

SEQ ID NO: 2196 - DNA, 1377 bp, synthetic construct
  misc_feature 1..1377: note = Description of Artificial Sequence: Synthetic polynucleotide
  source 1..1377: mol_type = other DNA
caaatgcagctggtgcagtctggggctgaggtgaagaagcctggggcctcagtgaaggtctcctgcaaggcttctggatacaccttcaccagttatgatatcaactgggtgcgacaggccactggacaagggcttgagtggatgggatggatgaaccctaacagtggtggcacaggctatgcacagaagttccagggcagagtcaccatgaccagggacacctccataagcacagcctacatggagctgagcagcctgagatctcaggacacggccgtgtattactgtgcgagagggggtgattacgttttcgggagttatcgtccctactactactactacggtatggacgtctggggccaagggaccacggtcaccgtctcctcagcctccaccaagggcccatcggtcttccccctggcaccctcctccaagagcacctctgggggcacagcggccctgggctgcctggtcaaggactacttccccgaaccggtgacggtgtcgtggaactcaggcgccctgaccagcggcgtgcacaccttcccggctgtcctacagtcctcaggactctactccctcagcagcgtggtgaccgtgccctccagcagcttgggcacccagacctacatctgcaacgtgaatcacaagcccagcaacaccaaggtggacaagaaagttgagcccaaatcttgtgacaaaactcacacatgcccaccgtgcccagcacctgaactcctggggggaccgtcagtcttcctcttccccccaaaacccaaggacaccctcatgatctcccggacccctgaggtcacatgcgtggtggtggacgtgagccacgaagaccctgaggtcaagttcaactggtacgtggacggcgtggaggtgcataatgccaagacaaagccgtgtgaggagcagtacggcagcacgtaccgttgtgtcagcgtcctcaccgtcctgcaccaggactggctgaatggcaaggagtacaagtgcaaggtctccaacaaagccctcccagcccccatcgagaaaaccatctccaaagccaaagggcagccccgagaaccacaggtgtacaccctgcccccatcccgggaggagatgaccaagaaccaggtcagcctgacctgcctggtcaaaggcttctatcccagcgacatcgccgtggagtgggagagcaatgggcagccggagaacaactacaagaccacgcctcccgtgctggactccgacggctccttcttcctctatagcaagctcaccgtggacaagagcaggtggcagcaggggaacgtcttctcatgctccgtgatgcatgaggctctgcacaaccactacacgcagaagagcctctccctgtctccgggtaaa

SEQ ID NO: 2197 - DNA, 1377 bp, synthetic construct
  misc_feature 1..1377: note = Description of Artificial Sequence: Synthetic polynucleotide
  source 1..1377: mol_type = other DNA
caaatgcagctggtgcagtctggggctgaggtgaagaagcctggggcctcagtgaaggtctcctgcaaggcttctggatacaccttcaccagttatgatatcaactgggtgcgacaggcccctggacaagggcttgagtggatgggatggatgaaccctaacagtggtggcacaggctatgcacagaagttccagggcagagtcaccatgaccagggacacctccataagcacagcctacatggagctgagcagcctgagatctgacgacacggccgtgtattactgtgcgagagggggtgattacgttttcgggagttatcgtccctactactactactacggtatggacgtctggggccaagggaccacggtcaccgtctcctcagcctccaccaagggcccatcggtcttccccctggcaccctcctccaagagcacctctgggggcacagcggccctgggctgcctggtcaaggactacttccccgaaccggtgacggtgtcgtggaactcaggcgccctgaccagcggcgtgcacaccttcccggctgtcctacagtcctcaggactctactccctcagcagcgtggtgaccgtgccctccagcagcttgggcacccagacctacatctgcaacgtgaatcacaagcccagcaacaccaaggtggacaagaaagttgagcccaaatcttgtgacaaaactcacacatgcccaccgtgcccagcacctgaactcctggggggaccgtcagtcttcctcttccccccaaaacccaaggacaccctcatgatctcccggacccctgaggtcacatgcgtggtggtggacgtgagccacgaagaccctgaggtcaagttcaactggtacgtggacggcgtggaggtgcataatgccaagacaaagccgtgtgaggagcagtacggcagcacgtaccgttgtgtcagcgtcctcaccgtcctgcaccaggactggctgaatggcaaggagtacaagtgcaaggtctccaacaaagccctcccagcccccatcgagaaaaccatctccaaagccaaagggcagccccgagaaccacaggtgtacaccctgcccccatcccgggaggagatgaccaagaaccaggtcagcctgacctgcctggtcaaaggcttctatcccagcgacatcgccgtggagtgggagagcaatgggcagccggagaacaactacaagaccacgcctcccgtgctggactccgacggctccttcttcctctatagcaagctcaccgtggacaagagcaggtggcagcaggggaacgtcttctcatgctccgtgatgcatgaggctctgcacaaccactacacgcagaagagcctctccctgtctccgggtaaa

SEQ ID NO: 2198 - DNA, 1353 bp, synthetic construct; identical to SEQ ID NO: 2187
  misc_feature 1..1353: note = Description of Artificial Sequence: Synthetic polynucleotide
  source 1..1353: mol_type = other DNA

SEQ ID NO: 2199 - DNA, 39 bp, synthetic construct
  misc_feature 1..39: note = Description of Artificial Sequence: Synthetic oligonucleotide
  source 1..39: mol_type = other DNA
tctggaagtagctccaacatcggaagtaatactgtaaac

SEQ ID NO: 2200 - DNA, 33 bp, synthetic construct
  misc_feature 1..33: note = Description of Artificial Sequence: Synthetic oligonucleotide
  source 1..33: mol_type = other DNA
cgggcaagtcaggacattagagattatttaggc

SEQ ID NO: 2201 - DNA, 33 bp, synthetic construct; identical to SEQ ID NO: 2200
  misc_feature 1..33: note = Description of Artificial Sequence: Synthetic oligonucleotide
  source 1..33: mol_type = other DNA

SEQ ID NO: 2202 - DNA, 33 bp, synthetic construct
  misc_feature 1..33: note = Description of Artificial Sequence: Synthetic oligonucleotide
  source 1..33: mol_type = other DNA
caggcgagtcaggacattagcaactatttaaat

SEQ ID NO: 2203 - DNA, 51 bp, synthetic construct
  misc_feature 1..51: note = Description of Artificial Sequence: Synthetic oligonucleotide
  source 1..51: mol_type = other DNA
aagtccagccagagtgttttatccagctccaacaataagaactacatagct

SEQ ID NO: 2204 - DNA, 51 bp, synthetic construct; identical to SEQ ID NO: 2203
  misc_feature 1..51: note = Description of Artificial Sequence: Synthetic oligonucleotide
  source 1..51: mol_type = other DNA

SEQ ID NO: 2205 - DNA, 51 bp, synthetic construct
  misc_feature 1..51: note = Description of Artificial Sequence: Synthetic oligonucleotide
  source 1..51: mol_type = other DNA
aagtccagccagagtgttttatccagctccaacaataagaactacttagct

SEQ ID NO: 2206 - DNA, 51 bp, synthetic construct; identical to SEQ ID NO: 2205
  misc_feature 1..51: note = Description of Artificial Sequence: Synthetic oligonucleotide
  source 1..51: mol_type = other DNA

SEQ ID NO: 2207 - DNA, 36 bp, synthetic construct
  misc_feature 1..36: note = Description of Artificial Sequence: Synthetic oligonucleotide
  source 1..36: mol_type = other DNA
agggccagtcagagtattagttacagttacttagcc

SEQ ID NO: 2208 - DNA, 33 bp, synthetic construct
  misc_feature 1..33: note = Description of Artificial Sequence: Synthetic oligonucleotide
  source 1..33: mol_type = other DNA
agggccagtcagagtgttagcagcaacttagcc

SEQ ID NO: 2209 - DNA, 33 bp, synthetic construct
  misc_feature 1..33: note = Description of Artificial Sequence: Synthetic oligonucleotide
  source 1..33: mol_type = other DNA
cgggcaagtcagggcattagaaatgagttaggc

SEQ ID NO: 2210 - DNA, 33 bp, synthetic construct
  misc_feature 1..33: note = Description of Artificial Sequence: Synthetic oligonucleotide
  source 1..33: mol_type = other DNA
caggcgagtcaggacattaccaactatttaaat

SEQ ID NO: 2211 - DNA, 33 bp, synthetic construct
  misc_feature 1..33: note = Description of Artificial Sequence: Synthetic oligonucleotide
  source 1..33: mol_type = other DNA
cgggcgagtcagggtcttatcatctggttagcc

SEQ ID NO: 2212 - DNA, 33 bp, synthetic construct; identical to SEQ ID NO: 2211
  misc_feature 1..33: note = Description of Artificial Sequence: Synthetic oligonucleotide
  source 1..33: mol_type = other DNA

SEQ ID NO: 2213 - DNA, 33 bp, synthetic construct; identical to SEQ ID NO: 2209
  misc_feature 1..33: note = Description of Artificial Sequence: Synthetic oligonucleotide
  source 1..33: mol_type = other DNA

SEQ ID NO: 2214 - DNA, 33 bp, synthetic construct; identical to SEQ ID NO: 2209
  misc_feature 1..33: note = Description of Artificial Sequence: Synthetic oligonucleotide
  source 1..33: mol_type = other DNA

SEQ ID NO: 2215 - DNA, 33 bp, synthetic construct; identical to SEQ ID NO: 2209
  misc_feature 1..33: note = Description of Artificial Sequence: Synthetic oligonucleotide
  source 1..33: mol_type = other DNA

SEQ ID NO: 2216 - DNA, 33 bp, synthetic construct; identical to SEQ ID NO: 2209
  misc_feature 1..33: note = Description of Artificial Sequence: Synthetic oligonucleotide
  source 1..33: mol_type = other DNA

SEQ ID NO: 2217 - DNA, 33 bp, synthetic construct; identical to SEQ ID NO: 2209
  misc_feature 1..33: note = Description of Artificial Sequence: Synthetic oligonucleotide
  source 1..33: mol_type = other DNA

SEQ ID NO: 2218 - DNA, 33 bp, synthetic construct; identical to SEQ ID NO: 2209
  misc_feature 1..33: note = Description of Artificial Sequence: Synthetic oligonucleotide
  source 1..33: mol_type = other DNA

SEQ ID NO: 2219 - DNA, 33 bp, synthetic construct; identical to SEQ ID NO: 2200
  misc_feature 1..33: note = Description of Artificial Sequence: Synthetic oligonucleotide
  source 1..33: mol_type = other DNA

SEQ ID NO: 2220 - DNA, 33 bp, synthetic construct; identical to SEQ ID NO: 2200
  misc_feature 1..33: note = Description of Artificial Sequence: Synthetic oligonucleotide
  source 1..33: mol_type = other DNA

SEQ ID NO: 2221 - DNA, 33 bp, synthetic construct; identical to SEQ ID NO: 2200
  misc_feature 1..33: note = Description of Artificial Sequence: Synthetic oligonucleotide
  source 1..33: mol_type = other DNA

SEQ ID NO: 2222 - DNA, 33 bp, synthetic construct; identical to SEQ ID NO: 2200
  misc_feature 1..33: note = Description of Artificial Sequence: Synthetic oligonucleotide
  source 1..33: mol_type = other DNA

SEQ ID NO: 2223 - DNA, 33 bp, synthetic construct; identical to SEQ ID NO: 2200
  misc_feature 1..33: note = Description of Artificial Sequence: Synthetic oligonucleotide
  source 1..33: mol_type = other DNA

SEQ ID NO: 2224 - DNA, 33 bp, synthetic construct; identical to SEQ ID NO: 2200
  misc_feature 1..33: note = Description of Artificial Sequence: Synthetic oligonucleotide
  source 1..33: mol_type = other DNA

SEQ ID NO: 2225 - DNA, 33 bp, synthetic construct; identical to SEQ ID NO: 2200
  misc_feature 1..33: note = Description of Artificial Sequence: Synthetic oligonucleotide
  source 1..33: mol_type = other DNA

SEQ ID NO: 2226 - DNA, 33 bp, synthetic construct
  misc_feature 1..33: note = Description of Artificial Sequence: Synthetic oligonucleotide
  source 1..33: mol_type = other DNA
cgggcaagtcaggaccttagaaattatttaggc

SEQ ID NO: 2227 - DNA, 33 bp, synthetic construct; identical to SEQ ID NO: 2226
  misc_feature 1..33: note = Description of Artificial Sequence: Synthetic oligonucleotide
  source 1..33: mol_type = other DNA

SEQ ID NO: 2228 - DNA, 33 bp, synthetic construct; identical to SEQ ID NO: 2226
  misc_feature 1..33: note = Description of Artificial Sequence: Synthetic oligonucleotide
  source 1..33: mol_type = other DNA

SEQ ID NO: 2229 - DNA, 33 bp, synthetic construct; identical to SEQ ID NO: 2226
  misc_feature 1..33: note = Description of Artificial Sequence: Synthetic oligonucleotide
  source 1..33: mol_type = other DNA

SEQ ID NO: 2230 - DNA, 33 bp, synthetic construct; identical to SEQ ID NO: 2226
  misc_feature 1..33: note = Description of Artificial Sequence: Synthetic oligonucleotide
  source 1..33: mol_type = other DNA

SEQ ID NO: 2231 - DNA, 33 bp, synthetic construct; identical to SEQ ID NO: 2226
  misc_feature 1..33: note = Description of Artificial Sequence: Synthetic oligonucleotide
  source 1..33: mol_type = other DNA

SEQ ID NO: 2232 - DNA, 33 bp, synthetic construct; identical to SEQ ID NO: 2226
  misc_feature 1..33: note = Description of Artificial Sequence: Synthetic oligonucleotide
  source 1..33: mol_type = other DNA

SEQ ID NO: 2233 - DNA, 33 bp, synthetic construct; identical to SEQ ID NO: 2226
  misc_feature 1..33: note = Description of Artificial Sequence: Synthetic oligonucleotide
  source 1..33: mol_type = other DNA

SEQ ID NO: 2234 - DNA, 33 bp, synthetic construct; identical to SEQ ID NO: 2226
  misc_feature 1..33: note = Description of Artificial Sequence: Synthetic oligonucleotide
  source 1..33: mol_type = other DNA

SEQ ID NO: 2235 - DNA, 33 bp, synthetic construct; identical to SEQ ID NO: 2226
  misc_feature 1..33: note = Description of Artificial Sequence: Synthetic oligonucleotide
  source 1..33: mol_type = other DNA

SEQ ID NO: 2236 - DNA, 33 bp, synthetic construct; identical to SEQ ID NO: 2226
  misc_feature 1..33: note = Description of Artificial Sequence: Synthetic oligonucleotide
  source 1..33: mol_type = other DNA

SEQ ID NO: 2237 - DNA, 33 bp, synthetic construct; identical to SEQ ID NO: 2226
  misc_feature 1..33: note = Description of Artificial Sequence: Synthetic oligonucleotide
  source 1..33: mol_type = other DNA

SEQ ID NO: 2238 - DNA, 33 bp, synthetic construct; identical to SEQ ID NO: 2202
  misc_feature 1..33: note = Description of Artificial Sequence: Synthetic oligonucleotide
  source 1..33: mol_type = other DNA

SEQ ID NO: 2239 - DNA, 33 bp, synthetic construct; identical to SEQ ID NO: 2202
  misc_feature 1..33: note = Description of Artificial Sequence: Synthetic oligonucleotide
  source 1..33: mol_type = other DNA

SEQ ID NO: 2240 - DNA, 33 bp, synthetic construct; identical to SEQ ID NO: 2202
  misc_feature 1..33: note = Description of Artificial Sequence: Synthetic oligonucleotide
  source 1..33: mol_type = other DNA

SEQ ID NO: 2241 - DNA, 33 bp, synthetic construct; identical to SEQ ID NO: 2202
  misc_feature 1..33: note = Description of Artificial Sequence: Synthetic oligonucleotide
  source 1..33: mol_type = other DNA

SEQ ID NO: 2242 - DNA, 33 bp, synthetic construct; identical to SEQ ID NO: 2202
  misc_feature 1..33: note = Description of Artificial Sequence: Synthetic oligonucleotide
  source 1..33: mol_type = other DNA

SEQ ID NO: 2243 - DNA, 33 bp, synthetic construct; identical to SEQ ID NO: 2202
  misc_feature 1..33: note = Description of Artificial Sequence: Synthetic oligonucleotide
  source 1..33: mol_type = other DNA

SEQ ID NO: 2244 - DNA, 33 bp, synthetic construct; identical to SEQ ID NO: 2202
  misc_feature 1..33: note = Description of Artificial Sequence: Synthetic oligonucleotide
  source 1..33: mol_type = other DNA

SEQ ID NO: 2245 - DNA, 33 bp, synthetic construct; identical to SEQ ID NO: 2202
  misc_feature 1..33: note = Description of Artificial Sequence: Synthetic oligonucleotide
  source 1..33: mol_type = other DNA

SEQ ID NO: 2246 - DNA, 33 bp, synthetic construct; identical to SEQ ID NO: 2202
  misc_feature 1..33: note = Description of Artificial Sequence: Synthetic oligonucleotide
  source 1..33: mol_type = other DNA

SEQ ID NO: 2247 - DNA, 33 bp, synthetic construct; identical to SEQ ID NO: 2200
  misc_feature 1..33: note = Description of Artificial Sequence: Synthetic oligonucleotide
  source 1..33: mol_type = other DNA

SEQ ID NO: 2248 - DNA, 33 bp, synthetic construct; identical to SEQ ID NO: 2200
  misc_feature 1..33: note = Description of Artificial Sequence: Synthetic oligonucleotide
  source 1..33: mol_type = other DNA

SEQ ID NO: 2249 - DNA, 33 bp, synthetic construct; identical to SEQ ID NO: 2200
  misc_feature 1..33: note = Description of Artificial Sequence: Synthetic oligonucleotide
  source 1..33: mol_type = other DNA

SEQ ID NO: 2250 - DNA, 33 bp, synthetic construct; identical to SEQ ID NO: 2200
  misc_feature 1..33: note = Description of Artificial Sequence: Synthetic oligonucleotide
  source 1..33: mol_type = other DNA

SEQ ID NO: 2251 - DNA, 33 bp, synthetic construct; identical to SEQ ID NO: 2200
  misc_feature 1..33: note = Description of Artificial Sequence: Synthetic oligonucleotide
  source 1..33: mol_type = other DNA

SEQ ID NO: 2252 - DNA, 33 bp, synthetic construct; identical to SEQ ID NO: 2200
  misc_feature 1..33: note = Description of Artificial Sequence: Synthetic oligonucleotide
  source 1..33: mol_type = other DNA

SEQ ID NO: 2253 - DNA, 33 bp, synthetic construct; identical to SEQ ID NO: 2200
  misc_feature 1..33: note = Description of Artificial Sequence: Synthetic oligonucleotide
  source 1..33: mol_type = other DNA

SEQ ID NO: 2254 - DNA, 33 bp, synthetic construct; identical to SEQ ID NO: 2210
  misc_feature 1..33: note = Description of Artificial Sequence: Synthetic oligonucleotide
  source 1..33: mol_type = other DNA

SEQ ID NO: 2255 - DNA, 33 bp, synthetic construct; identical to SEQ ID NO: 2210
  misc_feature 1..33: note = Description of Artificial Sequence: Synthetic oligonucleotide
  source 1..33: mol_type = other DNA

SEQ ID NO: 2256 - DNA, 33 bp, synthetic construct; identical to SEQ ID NO: 2210
  misc_feature 1..33: note = Description of Artificial Sequence: Synthetic oligonucleotide
  source 1..33: mol_type = other DNA

SEQ ID NO: 2257 - DNA, 33 bp, synthetic construct; identical to SEQ ID NO: 2210
  misc_feature 1..33: note = Description of Artificial Sequence: Synthetic oligonucleotide
  source 1..33: mol_type = other DNA

SEQ ID NO: 2258 - DNA, 33 bp, synthetic construct; identical to SEQ ID NO: 2210
  misc_feature 1..33: note = Description of Artificial Sequence: Synthetic oligonucleotide
  source 1..33: mol_type = other DNA

SEQ ID NO: 2259 - DNA, 33 bp, synthetic construct; identical to SEQ ID NO: 2210
  misc_feature 1..33: note = Description of Artificial Sequence: Synthetic oligonucleotide
  source 1..33: mol_type = other DNA

SEQ ID NO: 2260 - DNA, 33 bp, synthetic construct; identical to SEQ ID NO: 2210
  misc_feature 1..33: note = Description of Artificial Sequence: Synthetic oligonucleotide
  source 1..33: mol_type = other DNA

SEQ ID NO: 2261 - DNA, 33 bp, synthetic construct; identical to SEQ ID NO: 2210
  misc_feature 1..33: note = Description of Artificial Sequence: Synthetic oligonucleotide
  source 1..33: mol_type = other DNA

SEQ ID NO: 2262 - DNA, 33 bp, synthetic construct; identical to SEQ ID NO: 2210
  misc_feature 1..33: note = Description of Artificial Sequence: Synthetic oligonucleotide
  source 1..33: mol_type = other DNA

SEQ ID NO: 2263 - DNA, 33 bp, synthetic construct; identical to SEQ ID NO: 2210
  misc_feature 1..33: note = Description of Artificial Sequence: Synthetic oligonucleotide
  source 1..33: mol_type = other DNA

SEQ ID NO: 2264 - DNA, 33 bp, synthetic construct; identical to SEQ ID NO: 2210
  misc_feature 1..33: note = Description of Artificial Sequence: Synthetic oligonucleotide
  source 1..33: mol_type = other DNA

SEQ ID NO: 2265 - DNA, 36 bp, synthetic construct
  misc_feature 1..36: note = Description of Artificial Sequence: Synthetic oligonucleotide
  source 1..36: mol_type = other DNA
agggccagtcagatttttaccagcacctacttagcc

SEQ ID NO: 2266 - DNA, 36 bp, synthetic construct; identical to SEQ ID NO: 2265
  misc_feature 1..36: note = Description of Artificial Sequence: Synthetic oligonucleotide
  source 1..36: mol_type = other DNA

SEQ ID NO: 2267 - DNA, 36 bp, synthetic construct; identical to SEQ ID NO: 2265
  misc_feature 1..36: note = Description of Artificial Sequence: Synthetic oligonucleotide
  source 1..36: mol_type = other DNA

SEQ ID NO: 2268 - DNA, 36 bp, synthetic construct; identical to SEQ ID NO: 2265
  misc_feature 1..36: note = Description of Artificial Sequence: Synthetic oligonucleotide
  source 1..36: mol_type = other DNA

SEQ ID NO: 2269 - DNA, 33 bp, synthetic construct; identical to SEQ ID NO: 2208
  misc_feature 1..33: note = Description of Artificial Sequence: Synthetic oligonucleotide
  source 1..33: mol_type = other DNA

SEQ ID NO: 2270 - DNA, 33 bp, synthetic construct; identical to SEQ ID NO: 2208
  misc_feature 1..33: note = Description of Artificial Sequence: Synthetic oligonucleotide
  source 1..33: mol_type = other DNA

SEQ ID NO: 2271 - DNA, 33 bp, synthetic construct; identical to SEQ ID NO: 2208
  misc_feature 1..33: note = Description of Artificial Sequence: Synthetic oligonucleotide
  source 1..33: mol_type = other DNA

SEQ ID NO: 2272 - DNA, 33 bp, synthetic construct; identical to SEQ ID NO: 2208
  misc_feature 1..33: note = Description of Artificial Sequence: Synthetic oligonucleotide
  source 1..33: mol_type = other DNA

SEQ ID NO: 2273 - DNA, 33 bp, synthetic construct; identical to SEQ ID NO: 2208
  misc_feature 1..33: note = Description of Artificial Sequence: Synthetic oligonucleotide
  source 1..33: mol_type = other DNA

SEQ ID NO: 2274 - DNA, 33 bp, synthetic construct; identical to SEQ ID NO: 2208
  misc_feature 1..33: note = Description of Artificial Sequence: Synthetic oligonucleotide
  source 1..33: mol_type = other DNA

SEQ ID NO: 2275 - DNA, 33 bp, synthetic construct; identical to SEQ ID NO: 2208
  misc_feature 1..33: note = Description of Artificial Sequence: Synthetic oligonucleotide
  source 1..33: mol_type = other DNA

SEQ ID NO: 2276 - DNA, 33 bp, synthetic construct; identical to SEQ ID NO: 2208
  misc_feature 1..33: note = Description of Artificial Sequence: Synthetic oligonucleotide
  source 1..33: mol_type = other DNA

SEQ ID NO: 2277 - DNA, 36 bp, synthetic construct; identical to SEQ ID NO: 2207
  misc_feature 1..36: note = Description of Artificial Sequence: Synthetic oligonucleotide
  source 1..36: mol_type = other DNA

SEQ ID NO: 2278 - DNA, 36 bp, synthetic construct; identical to SEQ ID NO: 2207
  misc_feature 1..36: note = Description of Artificial Sequence: Synthetic oligonucleotide
  source 1..36: mol_type = other DNA

SEQ ID NO: 2279 - DNA, 36 bp, synthetic construct; identical to SEQ ID NO: 2207
  misc_feature 1..36: note = Description of Artificial Sequence: Synthetic oligonucleotide
  source 1..36: mol_type = other DNA

SEQ ID NO: 2280 - DNA, 36 bp, synthetic construct; identical to SEQ ID NO: 2207
  misc_feature 1..36: note = Description of Artificial Sequence: Synthetic oligonucleotide
  source 1..36: mol_type = other DNA

SEQ ID NO: 2281 - DNA, 36 bp, synthetic construct; identical to SEQ ID NO: 2207
  misc_feature 1..36: note = Description of Artificial Sequence: Synthetic oligonucleotide
  source 1..36: mol_type = other DNA

SEQ ID NO: 2282 - DNA, 36 bp, synthetic construct; identical to SEQ ID NO: 2207
  misc_feature 1..36: note = Description of Artificial Sequence: Synthetic oligonucleotide
  source 1..36: mol_type = other DNA

SEQ ID NO: 2283 - DNA, 36 bp, synthetic construct; identical to SEQ ID NO: 2207
  misc_feature 1..36: note = Description of Artificial Sequence: Synthetic oligonucleotide
  source 1..36: mol_type = other DNA

SEQ ID NO: 2284 - DNA, 51 bp, synthetic construct; identical to SEQ ID NO: 2203
  misc_feature 1..51: note = Description of Artificial Sequence: Synthetic oligonucleotide
  source 1..51: mol_type = other DNA

SEQ ID NO: 2285 - DNA, 51 bp, synthetic construct; identical to SEQ ID NO: 2203
  misc_feature 1..51: note = Description of Artificial Sequence: Synthetic oligonucleotide
  source 1..51: mol_type = other DNA

SEQ ID NO: 2286 - DNA, 51 bp, synthetic construct; identical to SEQ ID NO: 2203
  misc_feature 1..51: note = Description of Artificial Sequence: Synthetic oligonucleotide
  source 1..51: mol_type = other DNA

SEQ ID NO: 2287 - DNA, 51 bp, synthetic construct; identical to SEQ ID NO: 2203
  misc_feature 1..51: note = Description of Artificial Sequence: Synthetic oligonucleotide
  source 1..51: mol_type = other DNA

SEQ ID NO: 2288 - DNA, 51 bp, synthetic construct; identical to SEQ ID NO: 2203
  misc_feature 1..51: note = Description of Artificial Sequence: Synthetic oligonucleotide
  source 1..51: mol_type = other DNA

SEQ ID NO: 2289 - DNA, 51 bp, synthetic construct; identical to SEQ ID NO: 2203
  misc_feature 1..51: note = Description of Artificial Sequence: Synthetic oligonucleotide
  source 1..51: mol_type = other DNA

SEQ ID NO: 2290 - DNA, 51 bp, synthetic construct; identical to SEQ ID NO: 2203
  misc_feature 1..51: note = Description of Artificial Sequence: Synthetic oligonucleotide
  source 1..51: mol_type = other DNA

SEQ ID NO: 2291 - DNA, 51 bp, synthetic construct; identical to SEQ ID NO: 2203
  misc_feature 1..51: note = Description of Artificial Sequence: Synthetic oligonucleotide
  source 1..51: mol_type = other DNA

SEQ ID NO: 2292 - DNA, 51 bp, synthetic construct; identical to SEQ ID NO: 2203
  misc_feature 1..51: note = Description of Artificial Sequence: Synthetic oligonucleotide
  source 1..51: mol_type = other DNA

SEQ ID NO: 2293 - DNA, 51 bp, synthetic construct; identical to SEQ ID NO: 2203
  misc_feature 1..51: note = Description of Artificial Sequence: Synthetic oligonucleotide
  source 1..51: mol_type = other DNA

SEQ ID NO: 2294 - DNA, 51 bp, synthetic construct; identical to SEQ ID NO: 2203
  misc_feature 1..51: note = Description of Artificial Sequence: Synthetic oligonucleotide
  source 1..51: mol_type = other DNA

SEQ ID NO: 2295 - DNA, 51 bp, synthetic construct; identical to SEQ ID NO: 2205
  misc_feature 1..51: note = Description of Artificial Sequence: Synthetic oligonucleotide
  source 1..51: mol_type = other DNA

SEQ ID NO: 2296 - DNA, 51 bp, synthetic construct; identical to SEQ ID NO: 2205
  misc_feature 1..51: note = Description of Artificial Sequence: Synthetic oligonucleotide
  source 1..51: mol_type = other DNA

SEQ ID NO: 2297 - DNA, 51 bp, synthetic construct; identical to SEQ ID NO: 2205
  misc_feature 1..51: note = Description of Artificial Sequence: Synthetic oligonucleotide
  source 1..51: mol_type = other DNA

SEQ ID NO: 2298 - DNA, 51 bp, synthetic construct; identical to SEQ ID NO: 2205
  misc_feature 1..51: note = Description of Artificial Sequence: Synthetic oligonucleotide
  source 1..51: mol_type = other DNA

SEQ ID NO: 2299 - DNA, 51 bp, synthetic construct; identical to SEQ ID NO: 2205
  misc_feature 1..51: note = Description of Artificial Sequence: Synthetic oligonucleotide
  source 1..51: mol_type = other DNA

SEQ ID NO: 2300 - DNA, 51 bp, synthetic construct; identical to SEQ ID NO: 2205
  misc_feature 1..51: note = Description of Artificial Sequence: Synthetic oligonucleotide
  source 1..51: mol_type = other DNA

SEQ ID NO: 2301 - DNA, 51 bp, synthetic construct; identical to SEQ ID NO: 2205
  misc_feature 1..51: note = Description of Artificial Sequence: Synthetic oligonucleotide
  source 1..51: mol_type = other DNA

SEQ ID NO: 2302 - DNA, 51 bp, synthetic construct; identical to SEQ ID NO: 2205
  misc_feature 1..51: note = Description of Artificial Sequence: Synthetic oligonucleotide
  source 1..51: mol_type = other DNA

SEQ ID NO: 2303 - DNA, 51 bp, synthetic construct; identical to SEQ ID NO: 2205
  misc_feature 1..51: note = Description of Artificial Sequence: Synthetic oligonucleotide
  source 1..51: mol_type = other DNA

SEQ ID NO: 2304 - DNA, 51 bp, synthetic construct; identical to SEQ ID NO: 2203
  misc_feature 1..51: note = Description of Artificial Sequence: Synthetic oligonucleotide
  source 1..51: mol_type = other DNA

SEQ ID NO: 2305 - DNA, 51 bp, synthetic construct; identical to SEQ ID NO: 2203
  misc_feature 1..51: note = Description of Artificial Sequence: Synthetic oligonucleotide
  source 1..51: mol_type = other DNA

SEQ ID NO: 2306 - DNA, 51 bp, synthetic construct; identical to SEQ ID NO: 2203
  misc_feature 1..51: note = Description of Artificial Sequence: Synthetic oligonucleotide
  source 1..51: mol_type = other DNA

SEQ ID NO: 2307 - DNA, 51 bp, synthetic construct; identical to SEQ ID NO: 2203
  misc_feature 1..51: note = Description of Artificial Sequence: Synthetic oligonucleotide
  source 1..51: mol_type = other DNA

SEQ ID NO: 2308 - DNA, 51 bp, synthetic construct; identical to SEQ ID NO: 2203
  misc_feature 1..51: note = Description of Artificial Sequence: Synthetic oligonucleotide
  source 1..51: mol_type = other DNA

SEQ ID NO: 2309 - DNA, 51 bp, synthetic construct; identical to SEQ ID NO: 2205
  misc_feature 1..51: note = Description of Artificial Sequence: Synthetic oligonucleotide
  source 1..51: mol_type = other DNA

SEQ ID NO: 2310 - DNA, 51 bp, synthetic construct; identical to SEQ ID NO: 2205
  misc_feature 1..51: note = Description of Artificial Sequence: Synthetic oligonucleotide
  source 1..51: mol_type = other DNA

SEQ ID NO: 2311 - DNA, 51 bp, synthetic construct; identical to SEQ ID NO: 2205
  misc_feature 1..51: note = Description of Artificial Sequence: Synthetic oligonucleotide
  source 1..51: mol_type = other DNA

SEQ ID NO: 2312 - DNA, 51 bp, synthetic construct; identical to SEQ ID NO: 2205
  misc_feature 1..51: note = Description of Artificial Sequence: Synthetic oligonucleotide
  source 1..51: mol_type = other DNA

SEQ ID NO: 2313 - DNA, 51 bp, synthetic construct; identical to SEQ ID NO: 2205
  misc_feature 1..51: note = Description of Artificial Sequence: Synthetic oligonucleotide
  source 1..51: mol_type = other DNA

SEQ ID NO: 2314 - DNA, 51 bp, synthetic construct; identical to SEQ ID NO: 2205
  misc_feature 1..51: note = Description of Artificial Sequence: Synthetic oligonucleotide
  source 1..51: mol_type = other DNA

SEQ ID NO: 2315 - DNA, 51 bp, synthetic construct; identical to SEQ ID NO: 2205
  misc_feature 1..51: note = Description of Artificial Sequence: Synthetic oligonucleotide
  source 1..51: mol_type = other DNA

SEQ ID NO: 2316 - DNA, 51 bp, synthetic construct; identical to SEQ ID NO: 2205
  misc_feature 1..51: note = Description of Artificial Sequence: Synthetic oligonucleotide
  source 1..51: mol_type = other DNA

SEQ ID NO: 2317 - DNA, 51 bp, synthetic construct; identical to SEQ ID NO: 2205
  misc_feature 1..51: note = Description of Artificial Sequence: Synthetic oligonucleotide
  source 1..51: mol_type = other DNA

SEQ ID NO: 2318 - DNA, 51 bp, synthetic construct; identical to SEQ ID NO: 2205
  misc_feature 1..51: note = Description of Artificial Sequence: Synthetic oligonucleotide
  source 1..51: mol_type = other DNA

SEQ ID NO: 2319 - DNA, 51 bp, synthetic construct; identical to SEQ ID NO: 2205
  misc_feature 1..51: note = Description of Artificial Sequence: Synthetic oligonucleotide
  source 1..51: mol_type = other DNA

SEQ ID NO: 2320 - DNA, 51 bp, synthetic construct; identical to SEQ ID NO: 2205
  misc_feature 1..51: note = Description of Artificial Sequence: Synthetic oligonucleotide
  source 1..51: mol_type = other DNA

SEQ ID NO: 2321 - DNA, 51 bp, synthetic construct; identical to SEQ ID NO: 2205
  misc_feature 1..51: note = Description of Artificial Sequence: Synthetic oligonucleotide
  source 1..51: mol_type = other DNA

SEQ ID NO: 2322 - DNA, 39 bp, synthetic construct
  misc_feature 1..39: note = Description of Artificial Sequence: Synthetic oligonucleotide
  source 1..39: mol_type = other DNA
tctggaagtagctccaacatcggaagtcaaactgtaaac

SEQ ID NO: 2323 - DNA, 39 bp, synthetic construct; identical to SEQ ID NO: 2322
  misc_feature 1..39: note = Description of Artificial Sequence: Synthetic oligonucleotide
  source 1..39: mol_type = other DNA

SEQ ID NO: 2324 - DNA, 39 bp, synthetic construct
  misc_feature 1..39: note = Description of Artificial Sequence: Synthetic oligonucleotide
  source 1..39: mol_type = other DNA
tctggaagtagctccaacatcggaagtaattatgtaaac

SEQ ID NO: 2325 - DNA, 39 bp, synthetic construct; identical to SEQ ID NO: 2324
  misc_feature 1..39: note = Description of Artificial Sequence: Synthetic oligonucleotide
  source 1..39: mol_type = other DNA

SEQ ID NO: 2326 - DNA, 39 bp, synthetic construct; identical to SEQ ID NO: 2322
  misc_feature 1..39: note = Description of Artificial Sequence: Synthetic oligonucleotide
  source 1..39: mol_type = other DNA

SEQ ID NO: 2327 - DNA, 39 bp, synthetic construct; identical to SEQ ID NO: 2324
  misc_feature 1..39: note = Description of Artificial Sequence: Synthetic oligonucleotide
  source 1..39: mol_type = other DNA

SEQ ID NO: 2328 - DNA, 39 bp, synthetic construct; identical to SEQ ID NO: 2199
  misc_feature 1..39: note = Description of Artificial Sequence: Synthetic oligonucleotide
  source 1..39: mol_type = other DNA

SEQ ID NO: 2329 - DNA, 39 bp, synthetic construct; identical to SEQ ID NO: 2199
  misc_feature 1..39: note = Description of Artificial Sequence: Synthetic oligonucleotide
  source 1..39: mol_type = other DNA

SEQ ID NO: 2330 - DNA, 39 bp, synthetic construct; identical to SEQ ID NO: 2199
  misc_feature 1..39: note = Description of Artificial Sequence: Synthetic oligonucleotide
  source 1..39: mol_type = other DNA

SEQ ID NO: 2331 - DNA, 39 bp, synthetic construct; identical to SEQ ID NO: 2199
  misc_feature 1..39: note = Description of Artificial Sequence: Synthetic oligonucleotide
  source 1..39: mol_type = other DNA

SEQ ID NO: 2332 - DNA, 39 bp, synthetic construct; identical to SEQ ID NO: 2199
  misc_feature 1..39: note = Description of Artificial Sequence: Synthetic oligonucleotide
  source 1..39: mol_type = other DNA

SEQ ID NO: 2333 - DNA, 39 bp, synthetic construct; identical to SEQ ID NO: 2324
  misc_feature 1..39: note = Description of Artificial Sequence: Synthetic oligonucleotide
  source 1..39: mol_type = other DNA

SEQ ID NO: 2334 - DNA, 39 bp, synthetic construct; identical to SEQ ID NO: 2324
  misc_feature 1..39: note = Description of Artificial Sequence: Synthetic oligonucleotide
  source 1..39: mol_type = other DNA

SEQ ID NO: 2335 - DNA, 39 bp, synthetic construct; identical to SEQ ID NO: 2322
  misc_feature 1..39: note = Description of Artificial Sequence: Synthetic oligonucleotide
  source 1..39: mol_type = other DNA

SEQ ID NO: 2336 - DNA, 33 bp, synthetic construct; identical to SEQ ID NO: 2226
  misc_feature 1..33: note = Description of Artificial Sequence: Synthetic oligonucleotide
  source 1..33: mol_type = other DNA

SEQ ID NO: 2337 - DNA, 33 bp, synthetic construct; identical to SEQ ID NO: 2200
  misc_feature 1..33: note = Description of Artificial Sequence: Synthetic oligonucleotide
  source 1..33: mol_type = other DNA

SEQ ID NO: 2338 - DNA, 39 bp, synthetic construct; identical to SEQ ID NO: 2199
  misc_feature 1..39: note = Description of Artificial Sequence: Synthetic oligonucleotide
  source 1..39: mol_type = other DNA

SEQ ID NO: 2339 - DNA, 33 bp, synthetic construct
  misc_feature 1..33: note = Description of Artificial Sequence: Synthetic oligonucleotide
  source 1..33: mol_type = other DNA
cgggcaagtcagaccattagcaggtttttaaat

SEQ ID NO: 2340 - DNA, 39 bp, synthetic construct
  misc_feature 1..39: note = Description of Artificial Sequence: Synthetic oligonucleotide
  source 1..39: mol_type = other DNA
tctggaagcagctccaacattggaaataattatgtatcc

SEQ ID NO: 2341 - DNA, 33 bp, synthetic construct; identical to SEQ ID NO: 2339
  misc_feature 1..33: note = Description of Artificial Sequence: Synthetic oligonucleotide
  source 1..33: mol_type = other DNA

SEQ ID NO: 2342 - DNA, 33 bp, synthetic construct; identical to SEQ ID NO: 2339
  misc_feature 1..33: note = Description of Artificial Sequence: Synthetic oligonucleotide
  source 1..33: mol_type = other DNA

SEQ ID NO: 2343 - DNA, 33 bp, synthetic construct; identical to SEQ ID NO: 2339
  misc_feature 1..33: note = Description of Artificial Sequence: Synthetic oligonucleotide
  source 1..33: mol_type = other DNA

SEQ ID NO: 2344 - DNA, 33 bp, synthetic construct; identical to SEQ ID NO: 2339
  misc_feature 1..33: note = Description of Artificial Sequence: Synthetic oligonucleotide
  source 1..33: mol_type = other DNA

SEQ ID NO: 2345 - DNA, 33 bp, synthetic construct; identical to SEQ ID NO: 2339
  misc_feature 1..33: note = Description of Artificial Sequence: Synthetic oligonucleotide
  source 1..33: mol_type = other DNA

SEQ ID NO: 2346 - DNA, 33 bp, synthetic construct; identical to SEQ ID NO: 2339
  misc_feature 1..33: note = Description of Artificial Sequence: Synthetic oligonucleotide
  source 1..33: mol_type = other DNA

SEQ ID NO: 2347 - DNA, 39 bp, synthetic construct; identical to SEQ ID NO: 2340
  misc_feature 1..39: note = Description of Artificial Sequence: Synthetic oligonucleotide
  source 1..39: mol_type = other DNA

SEQ ID NO: 2348 - DNA, 39 bp, synthetic construct; identical to SEQ ID NO: 2340
  misc_feature 1..39: note = Description of Artificial Sequence: Synthetic oligonucleotide
  source 1..39: mol_type = other DNA

SEQ ID NO: 2349 - DNA, 39 bp, synthetic construct; identical to SEQ ID NO: 2340
  misc_feature 1..39: note = Description of Artificial Sequence: Synthetic oligonucleotide
  source 1..39: mol_type = other DNA

SEQ ID NO: 2350 - DNA, 39 bp, synthetic construct; identical to SEQ ID NO: 2340
  misc_feature 1..39: note = Description of Artificial Sequence: Synthetic oligonucleotide
  source 1..39: mol_type = other DNA

SEQ ID NO: 2351 - DNA, 39 bp, synthetic construct; identical to SEQ ID NO: 2340
  misc_feature 1..39: note = Description of Artificial Sequence: Synthetic oligonucleotide
  source 1..39: mol_type = other DNA

SEQ ID NO: 2352 - DNA, 39 bp, synthetic construct; identical to SEQ ID NO: 2340
  misc_feature 1..39: note = Description of Artificial Sequence: Synthetic oligonucleotide
  source 1..39: mol_type = other DNA

SEQ ID NO: 2353 - DNA, 39 bp, synthetic construct; identical to SEQ ID NO: 2340
  misc_feature 1..39: note = Description of Artificial Sequence: Synthetic oligonucleotide
  source 1..39: mol_type = other DNA

SEQ ID NO: 2354 - DNA, 39 bp, synthetic construct; identical to SEQ ID NO: 2340
  misc_feature 1..39: note = Description of Artificial Sequence: Synthetic oligonucleotide
  source 1..39: mol_type = other DNA

SEQ ID NO: 2355 - DNA, 33 bp, synthetic construct; identical to SEQ ID NO: 2339
  misc_feature 1..33: note = Description of Artificial Sequence: Synthetic oligonucleotide
  source 1..33: mol_type = other DNA

SEQ ID NO: 2356 - DNA, 21 bp, synthetic construct
  misc_feature 1..21: note = Description of Artificial Sequence: Synthetic oligonucleotide
  source 1..21: mol_type = other DNA
actaataatcagcggccctca

SEQ ID NO: 2357 - DNA, 21 bp, synthetic construct
  misc_feature 1..21: note = Description of Artificial Sequence: Synthetic oligonucleotide
  source 1..21: mol_type = other DNA
ggtgcatccagtttgcaaagt

SEQ ID NO: 2358 - DNA, 21 bp, synthetic construct
  misc_feature 1..21: note = Description of Artificial Sequence: Synthetic oligonucleotide
  source 1..21: mol_type = other DNA
ggtgcatccagtttgcaaagt

SEQ ID NO: 2359 - DNA, 21 bp, synthetic construct
  misc_feature 1..21: note = Description of Artificial Sequence: Synthetic oligonucleotide
  source 1..21: mol_type = other DNA
gatgcatccaatttggaaaca

SEQ ID NO: 2360 - DNA, 21 bp, synthetic construct
  misc_feature 1..21: note = Description of Artificial Sequence: Synthetic oligonucleotide
  source 1..21: mol_type = other DNA
tgggcatctacccgggaatcc

SEQ ID NO: 2361 - DNA, 21 bp, synthetic construct
  misc_feature 1..21: note = Description of Artificial Sequence: Synthetic oligonucleotide
  source 1..21: mol_type = other DNA
tgggcatctacccgggaatcc

SEQ ID NO: 2362 - DNA, 21 bp, synthetic construct
  misc_feature 1..21: note = Description of Artificial Sequence: Synthetic oligonucleotide
  source 1..21: mol_type = other DNA
tggacttctacccgagattcc

SEQ ID NO: 2363 - DNA, 21 bp, synthetic construct
  misc_feature 1..21: note = Description of Artificial Sequence: Synthetic oligonucleotide
  source 1..21: mol_type = other DNA
tggacttctacccgagattcc

SEQ ID NO: 2364 - DNA, 21 bp, synthetic construct
  misc_feature 1..21: note = Description of Artificial Sequence: Synthetic oligonucleotide
  source 1..21: mol_type = other DNA
ggtgcatccagcagggccact

SEQ ID NO: 2365 - DNA, 21 bp, synthetic construct
  misc_feature 1..21: note = Description of Artificial Sequence: Synthetic oligonucleotide
  source 1..21: mol_type = other DNA
ggtgcagccaccagggccact

SEQ ID NO: 2366 - DNA, 21 bp, synthetic construct
  misc_feature 1..21: note = Description of Artificial Sequence: Synthetic oligonucleotide
  source 1..21: mol_type = other DNA
ggtgcatccagtttgcaaagt

SEQ ID NO: 2367 - DNA, 21 bp, synthetic construct
  misc_feature 1..21: note = Description of Artificial Sequence: Synthetic oligonucleotide
  source 1..21: mol_type = other DNA
gatgcttccaatttggagcca

SEQ ID NO: 2368 - DNA, 21 bp, synthetic construct
  misc_feature 1..21: note = Description of Artificial Sequence: Synthetic oligonucleotide
  source 1..21: mol_type = other DNA
gctgcatccagtttgcaaagt

SEQ ID NO: 2369 - DNA, 21 bp, synthetic construct
  misc_feature 1..21: note = Description of Artificial Sequence: Synthetic oligonucleotide
  source 1..21: mol_type = other DNA
gctgcatccagtttgcaaagt

SEQ ID NO: 2370 - DNA, 21 bp, synthetic construct
  misc_feature 1..21: note = Description of Artificial Sequence: Synthetic oligonucleotide
  source 1..21: mol_type = other DNA
ggtgcatccagtttgcaaagt

SEQ ID NO: 2371 - DNA, 21 bp, synthetic construct
  misc_feature 1..21: note = Description of Artificial Sequence: Synthetic oligonucleotide
  source 1..21: mol_type = other DNA
ggtgcatccagtttgcaaagt

SEQ ID NO: 2372 - DNA, 21 bp, synthetic construct
  misc_feature 1..21: note = Description of Artificial Sequence: Synthetic oligonucleotide
  source 1..21: mol_type = other DNA
ggtgcatccagtttgcaaagt

SEQ ID NO: 2373 - DNA, 21 bp, synthetic construct
  misc_feature 1..21: note = Description of Artificial Sequence: Synthetic oligonucleotide
  source 1..21: mol_type = other DNA
ggtgcatccagtttgcaaagt

SEQ ID NO: 2374 - DNA, 21 bp, synthetic construct
  misc_feature 1..21: note = Description of Artificial Sequence: Synthetic oligonucleotide
  source 1..21: mol_type = other DNA
ggtgcatccagtttgcaaagt

SEQ ID NO: 2375 - DNA, 21 bp, synthetic construct
  misc_feature 1..21: note = Description of Artificial Sequence: Synthetic oligonucleotide
  source 1..21: mol_type = other DNA
ggtgcatccagtttgcaaagt

SEQ ID NO: 2376 - DNA, 21 bp, synthetic construct
  misc_feature 1..21: note = Description of Artificial Sequence: Synthetic oligonucleotide
  source 1..21: mol_type = other DNA
ggtgcatccagtttgcaaagt

SEQ ID NO: 2377 - DNA, 21 bp, synthetic construct
  misc_feature 1..21: note = Description of Artificial Sequence: Synthetic oligonucleotide
  source 1..21: mol_type = other DNA
ggtgcatccagtttgcaaagt

SEQ ID NO: 2378 - DNA, 21 bp, synthetic construct
  misc_feature 1..21: note = Description of Artificial Sequence: Synthetic oligonucleotide
  source 1..21: mol_type = other DNA
ggtgcatccagtttgcaaagt

SEQ ID NO: 2379 - DNA, 21 bp, synthetic construct
  misc_feature 1..21: note = Description of Artificial Sequence: Synthetic oligonucleotide
  source 1..21: mol_type = other DNA
ggtgcatccagtttgcaaagt

SEQ ID NO: 2380 - DNA, 21 bp, synthetic construct
  misc_feature 1..21: note = Description of Artificial Sequence: Synthetic oligonucleotide
  source 1..21: mol_type = other DNA
ggtgcatccagtttgcaaagt

SEQ ID NO: 2381 - DNA, 21 bp, synthetic construct
  misc_feature 1..21: note = Description of Artificial Sequence: Synthetic oligonucleotide
  source 1..21: mol_type = other DNA
ggtgcatccagtttgcaaagt

SEQ ID NO: 2382 - DNA, 21 bp, synthetic construct
  misc_feature 1..21: note = Description of Artificial Sequence: Synthetic oligonucleotide
  source 1..21: mol_type = other DNA
ggtgcatccagtttgcaaagt

SEQ ID NO: 2383 - DNA, 21 bp, synthetic construct
  misc_feature 1..21: note = Description of Artificial Sequence: Synthetic oligonucleotide
  source 1..21: mol_type = other DNA
ggtgcatccagtttgcaaagt

SEQ ID NO: 2384 - DNA, 21 bp, synthetic construct
  misc_feature 1..21: note = Description of Artificial Sequence: Synthetic oligonucleotide
  source 1..21: mol_type = other DNA
ggtgcatccagtttgcaaagt

SEQ ID NO: 2385 - DNA, 21 bp, synthetic construct
  misc_feature 1..21: note = Description of Artificial Sequence: Synthetic oligonucleotide
  source 1..21: mol_type = other DNA
ggtgcatccagtttgcaaagt

SEQ ID NO: 2386 - DNA, 21 bp, synthetic construct
  misc_feature 1..21: note = Description of Artificial Sequence: Synthetic oligonucleotide
  source 1..21: mol_type = other DNA
ggtgcatccagtttgcaaagt

SEQ ID NO: 2387 - DNA, 21 bp, synthetic construct
  misc_feature 1..21: note = Description of Artificial Sequence: Synthetic oligonucleotide
  source 1..21: mol_type = other DNA
ggtgcatccagtttgcaaagt

SEQ ID NO: 2388 - DNA, 21 bp, synthetic construct
  misc_feature 1..21: note = Description of Artificial Sequence: Synthetic oligonucleotide
  source 1..21: mol_type = other DNA
ggtgcatccagtttgcaaagt

SEQ ID NO: 2389 - DNA, 21 bp, synthetic construct
  misc_feature 1..21: note = Description of Artificial Sequence: Synthetic oligonucleotide
  source 1..21: mol_type = other DNA
ggtgcatccagtttgcaaagt

SEQ ID NO: 2390 - DNA, 21 bp, synthetic construct
  misc_feature 1..21: note = Description of Artificial Sequence: Synthetic oligonucleotide
  source 1..21: mol_type = other DNA
ggtgcatccagtttgcaaagt

SEQ ID NO: 2391 - DNA, 21 bp, synthetic construct
  misc_feature 1..21: note = Description of Artificial Sequence: Synthetic oligonucleotide
  source 1..21: mol_type = other DNA
ggtgcatccagtttgcaaagt

SEQ ID NO: 2392 - DNA, 21 bp, synthetic construct
  misc_feature 1..21: note = Description of Artificial Sequence: Synthetic oligonucleotide
  source 1..21: mol_type = other DNA
ggtgcatccagtttgcaaagt

SEQ ID NO: 2393 - DNA, 21 bp, synthetic construct
  misc_feature 1..21: note = Description of Artificial Sequence: Synthetic oligonucleotide
  source 1..21: mol_type = other DNA
ggtgcatccagtttgcaaagt

SEQ ID NO: 2394 - DNA, 21 bp, synthetic construct
  misc_feature 1..21: note = Description of Artificial Sequence: Synthetic oligonucleotide
  source 1..21: mol_type = other DNA
ggtgcatccagtttgcaaagt

SEQ ID NO: 2395 - DNA, 21 bp, synthetic construct
  misc_feature 1..21: note = Description of Artificial Sequence: Synthetic oligonucleotide
  source 1..21: mol_type = other DNA
gatgcatccaatttggaaaca

SEQ ID NO: 2396 - DNA, 21 bp, synthetic construct
  misc_feature 1..21: note = Description of Artificial Sequence: Synthetic oligonucleotide
  source 1..21: mol_type = other DNA
gatgcatccaatttggaaaca

SEQ ID NO: 2397 - DNA, 21 bp, synthetic construct
  misc_feature 1..21: note = Description of Artificial Sequence: Synthetic oligonucleotide
  source 1..21: mol_type = other DNA
gatgcatccaatttggaaaca

SEQ ID NO: 2398 - DNA, 21 bp, synthetic construct
  misc_feature 1..21: note = Description of Artificial Sequence: Synthetic oligonucleotide
  source 1..21: mol_type = other DNA
gatgcatccaatttggaaaca

SEQ ID NO: 2399 - DNA, 21 bp, synthetic construct
  misc_feature 1..21: note = Description of Artificial Sequence: Synthetic oligonucleotide
  source 1..21: mol_type = other DNA
gatgcatccaatttggaaaca

SEQ ID NO: 2400 - DNA, 21 bp, synthetic construct
  misc_feature 1..21: note = Description of Artificial Sequence: Synthetic oligonucleotide
  source 1..21: mol_type = other DNA
gatgcatccaatttggaaaca

SEQ ID NO: 2401 - DNA, 21 bp, synthetic construct
  misc_feature 1..21: note = Description of Artificial Sequence: Synthetic oligonucleotide
  source 1..21: mol_type = other DNA
gatgcatccaatttggaaaca

SEQ ID NO: 2402 - DNA, 21 bp, synthetic construct
  misc_feature 1..21: note = Description of Artificial Sequence: Synthetic oligonucleotide
  source 1..21: mol_type = other DNA
gatgcatccaatttggaaaca

SEQ ID NO: 2403 - DNA, 21 bp, synthetic construct
  misc_feature 1..21: note = Description of Artificial Sequence: Synthetic oligonucleotide
  source 1..21: mol_type = other DNA
gatgcatccaatttggaaaca

SEQ ID NO: 2404 - DNA, 21 bp, synthetic construct
  misc_feature 1..21: note = Description of Artificial Sequence: Synthetic oligonucleotide
  source 1..21: mol_type = other DNA
ggtgcatccagtttgcaaagt

SEQ ID NO: 2405 - DNA, 21 bp, synthetic construct
  misc_feature 1..21: note = Description of Artificial Sequence: Synthetic oligonucleotide
  source 1..21: mol_type = other DNA
ggtgcatccagtttgcaaagt

SEQ ID NO: 2406 - DNA, 21 bp, synthetic construct
  misc_feature 1..21: note = Description of Artificial Sequence: Synthetic oligonucleotide
  source 1..21: mol_type = other DNA
ggtgcatccagtttgcaaagt

SEQ ID NO: 2407 - DNA, 21 bp, synthetic construct
  misc_feature 1..21: note = Description of Artificial Sequence: Synthetic oligonucleotide
  source 1..21: mol_type = other DNA
ggtgcatccagtttgcaaagt

SEQ ID NO: 2408 - DNA, 21 bp, synthetic construct
  misc_feature 1..21: note = Description of Artificial Sequence: Synthetic oligonucleotide
  source 1..21: mol_type = other DNA
ggtgcatccagtttgcaaagt

SEQ ID NO: 2409 - DNA, 21 bp, synthetic construct
  misc_feature 1..21: note = Description of Artificial Sequence: Synthetic oligonucleotide
  source 1..21: mol_type = other DNA
ggtgcatccagtttgcaaagt

SEQ ID NO: 2410 - DNA, 21 bp, synthetic construct
  misc_feature 1..21: note = Description of Artificial Sequence: Synthetic oligonucleotide
  source 1..21: mol_type = other DNA
ggtgcatccagtttgcaaagt

SEQ ID NO: 2411 - DNA, 21 bp, synthetic construct
  misc_feature 1..21: note = Description of Artificial Sequence: Synthetic oligonucleotide
  source 1..21: mol_type = other DNA
gatgcttccaatttggagcca

SEQ ID NO: 2412 - DNA, 21 bp, synthetic construct
  misc_feature 1..21: note = Description of Artificial Sequence: Synthetic oligonucleotide
  source 1..21: mol_type = other DNA
gatgcttccaatttggagcca

SEQ ID NO: 2413 - DNA, 21 bp, synthetic construct
  misc_feature 1..21: note = Description of Artificial Sequence: Synthetic oligonucleotide
  source 1..21: mol_type = other DNA
gatgcttccaatttggagcca

SEQ ID NO: 2414 - DNA, 21 bp, synthetic construct
  misc_feature 1..21: note = Description of Artificial Sequence: Synthetic oligonucleotide
  source 1..21: mol_type = other DNA
gatgcttccaatttggagcca

SEQ ID NO: 2415 - DNA, 21 bp, synthetic construct
  misc_feature 1..21: note = Description of Artificial Sequence: Synthetic oligonucleotide
  source 1..21: mol_type = other DNA
gatgcttccaatttggagcca

SEQ ID NO: 2416 - DNA, 21 bp, synthetic construct
  misc_feature 1..21: note = Description of Artificial Sequence: Synthetic oligonucleotide
  source 1..21: mol_type = other DNA
gatgcttccaatttggagcca

SEQ ID NO: 2417 - DNA, 21 bp, synthetic construct
  misc_feature 1..21: note = Description of Artificial Sequence: Synthetic oligonucleotide
  source 1..21: mol_type = other DNA
gatgcttccaatttggagcca

SEQ ID NO: 2418 - DNA, 21 bp, synthetic construct
  misc_feature 1..21: note = Description of Artificial Sequence: Synthetic oligonucleotide
  source 1..21: mol_type = other DNA
gatgcttccaatttggagcca

SEQ ID NO: 2419 - DNA, 21 bp, synthetic construct
  misc_feature 1..21: note = Description of Artificial Sequence: Synthetic oligonucleotide
  source 1..21: mol_type = other DNA
gatgcttccaatttggagcca

SEQ ID NO: 2420 - DNA, 21 bp, synthetic construct
  misc_feature 1..21: note = Description of Artificial Sequence: Synthetic oligonucleotide
  source 1..21: mol_type = other DNA
gatgcttccaatttggagcca

SEQ ID NO: 2421 - DNA, 21 bp, synthetic construct
  misc_feature 1..21: note = Description of Artificial Sequence: Synthetic oligonucleotide
  source 1..21: mol_type = other DNA
gatgcttccaatttggagcca

SEQ ID NO: 2422 - DNA, 21 bp, synthetic construct
  misc_feature 1..21: note = Description of Artificial Sequence: Synthetic oligonucleotide
  source 1..21: mol_type = other DNA
ggtgcatccagcagggccact

SEQ ID NO: 2423 - DNA, 21 bp, synthetic construct
  misc_feature 1..21: note = Description of Artificial Sequence: Synthetic oligonucleotide
  source 1..21: mol_type = other DNA
ggtgcatccagcagggccact

SEQ ID NO: 2424 - DNA, 21 bp, synthetic construct
  misc_feature 1..21: note = Description of Artificial Sequence: Synthetic oligonucleotide
  source 1..21: mol_type = other DNA
ggtgcatccagcagggccact

SEQ ID NO: 2425 - DNA, 21 bp, synthetic construct
  misc_feature 1..21: note = Description of Artificial Sequence: Synthetic oligonucleotide
  source 1..21: mol_type = other DNA
ggtgcatccagcagggccact

SEQ ID NO: 2426 - DNA, 21 bp, synthetic construct
  misc_feature 1..21: note = Description of Artificial Sequence: Synthetic oligonucleotide
  source 1..21: mol_type = other DNA
ggtgcagccaccagggccact

SEQ ID NO: 2427 - DNA, 21 bp, synthetic construct
  misc_feature 1..21: note = Description of Artificial Sequence: Synthetic oligonucleotide
  source 1..21: mol_type = other DNA
ggtgcagccaccagggccact

SEQ ID NO: 2428 - DNA, 21 bp, synthetic construct
  misc_feature 1..21: note = Description of Artificial Sequence: Synthetic oligonucleotide
  source 1..21: mol_type = other DNA
ggtgcagccaccagggccact

SEQ ID NO: 2429 - DNA, 21 bp, synthetic construct
  misc_feature 1..21: note = Description of Artificial Sequence: Synthetic oligonucleotide
  source 1..21: mol_type = other DNA
ggtgcagccaccagggccact

SEQ ID NO: 2430 - DNA, 21 bp, synthetic construct
  misc_feature 1..21: note = Description of Artificial Sequence: Synthetic oligonucleotide
  source 1..21: mol_type = other DNA
ggtgcagccaccagggccact

SEQ ID NO: 2431 - DNA, 21 bp, synthetic construct
  misc_feature 1..21: note = Description of Artificial Sequence: Synthetic oligonucleotide
  source 1..21: mol_type = other DNA
ggtgcagccaccagggccact

SEQ ID NO: 2432 - DNA, 21 bp, synthetic construct
  misc_feature 1..21: note = Description of Artificial Sequence: Synthetic oligonucleotide
  source 1..21: mol_type = other DNA
ggtgcagccaccagggccact

SEQ ID NO: 2433 - DNA, 21 bp, synthetic construct
  misc_feature 1..21: note = Description of Artificial Sequence: Synthetic oligonucleotide
  source 1..21: mol_type = other DNA
ggtgcagccaccagggccact

SEQ ID NO: 2434 - DNA, 21 bp, synthetic construct
  misc_feature 1..21: note = Description of Artificial Sequence: Synthetic oligonucleotide
  source 1..21: mol_type = other DNA
ggtgcatccagcagggccact

SEQ ID NO: 2435 - DNA, 21 bp, synthetic construct
  misc_feature 1..21: note = Description of Artificial Sequence: Synthetic oligonucleotide
  source 1..21: mol_type = other DNA
ggtgcatccagcagggccact

SEQ ID NO: 2436 - DNA, 21 bp, synthetic construct
  misc_feature 1..21: note = Description of Artificial Sequence: Synthetic oligonucleotide
  source 1..21: mol_type = other DNA
ggtgcatccagcagggccact

SEQ ID NO: 2437 - DNA, 21 bp, synthetic construct
  misc_feature 1..21: note = Description of Artificial Sequence: Synthetic oligonucleotide
  source 1..21: mol_type = other DNA
ggtgcatccagcagggccact

SEQ ID NO: 2438 - DNA, 21 bp, synthetic construct
  misc_feature 1..21: note = Description of Artificial Sequence: Synthetic oligonucleotide
  source 1..21: mol_type = other DNA
ggtgcatccagcagggccact

SEQ ID NO: 2439 - DNA, 21 bp, synthetic construct
  misc_feature 1..21: note = Description of Artificial Sequence: Synthetic oligonucleotide
  source 1..21: mol_type = other DNA
ggtgcatccagcagggccact

SEQ ID NO: 2440 - DNA, 21 bp, synthetic construct
  misc_feature 1..21: note = Description of Artificial Sequence: Synthetic oligonucleotide
  source 1..21: mol_type = other DNA
ggtgcatccagcagggccact

SEQ ID NO: 2441 - DNA, 21 bp, synthetic construct
  misc_feature 1..21: note = Description of Artificial Sequence: Synthetic oligonucleotide
  source 1..21: mol_type = other DNA
tgggcatctacccgggaatcc

SEQ ID NO: 2442 - DNA, 21 bp, synthetic construct
  misc_feature 1..21: note = Description of Artificial Sequence: Synthetic oligonucleotide
  source 1..21: mol_type = other DNA
tgggcatctacccgggaatcc

SEQ ID NO: 2443 - DNA, 21 bp, synthetic construct
  misc_feature 1..21: note = Description of Artificial Sequence: Synthetic oligonucleotide
  source 1..21: mol_type = other DNA
tgggcatctacccgggaatcc

SEQ ID NO: 2444 - DNA, 21 bp, synthetic construct
  misc_feature 1..21: note = Description of Artificial Sequence: Synthetic oligonucleotide
  source 1..21: mol_type = other DNA
tgggcatctacccgggaatcc

SEQ ID NO: 2445 - DNA, 21 bp, synthetic construct
  misc_feature 1..21: note = Description of Artificial Sequence: Synthetic oligonucleotide
  source 1..21: mol_type = other DNA
tgggcatctacccgggaatcc

SEQ ID NO: 2446 - DNA, 21 bp, synthetic construct
  misc_feature 1..21: note = Description of Artificial Sequence: Synthetic oligonucleotide
  source 1..21: mol_type = other DNA
tgggcatctacccgggaatcc

SEQ ID NO: 2447 - DNA, 21 bp, synthetic construct
  misc_feature 1..21: note = Description of Artificial Sequence: Synthetic oligonucleotide
  source 1..21: mol_type = other DNA
tgggcatctacccgggaatcc

SEQ ID NO: 2448 - DNA, 21 bp, synthetic construct
  misc_feature 1..21: note = Description of Artificial Sequence: Synthetic oligonucleotide
  source 1..21: mol_type = other DNA
tgggcatctacccgggaatcc

SEQ ID NO: 2449 - DNA, 21 bp, synthetic construct
  misc_feature 1..21: note = Description of Artificial Sequence: Synthetic oligonucleotide
  source 1..21: mol_type = other DNA
tgggcatctacccgggaatcc

SEQ ID NO: 2450 - DNA, 21 bp, synthetic construct
  misc_feature 1..21: note = Description of Artificial Sequence: Synthetic oligonucleotide
  source 1..21: mol_type = other DNA
tgggcatctacccgggaatcc

SEQ ID NO: 2451 - DNA, 21 bp, synthetic construct
  misc_feature 1..21: note = Description of Artificial Sequence: Synthetic oligonucleotide
  source 1..21: mol_type = other DNA
tgggcatctacccgggaatcc

SEQ ID NO: 2452 - DNA, 21 bp, synthetic construct
  misc_feature 1..21: note = Description of Artificial Sequence: Synthetic oligonucleotide
  source 1..21: mol_type = other DNA
tggacttctacccgagaatcc

SEQ ID NO: 2453 - DNA, 21 bp, synthetic construct
  misc_feature 1..21: note = Description of Artificial Sequence: Synthetic oligonucleotide
  source 1..21: mol_type = other DNA
tggacttctacccgagaatcc

SEQ ID NO: 2454 - DNA, 21 bp, synthetic construct
  misc_feature 1..21: note = Description of Artificial Sequence: Synthetic oligonucleotide
  source 1..21: mol_type = other DNA
tggacttctacccgagattcc

SEQ ID NO: 2455 - DNA, 21 bp, synthetic construct
  misc_feature 1..21: note = Description of Artificial Sequence: Synthetic oligonucleotide
  source 1..21: mol_type = other DNA
tggacttctacccgagaatcc

SEQ ID NO: 2456 - DNA, 21 bp, synthetic construct
  misc_feature 1..21: note = Description of Artificial Sequence: Synthetic oligonucleotide
  source 1..21: mol_type = other DNA
tggacttctacccgagaatcc

SEQ ID NO: 2457 - DNA, 21 bp, synthetic construct
  misc_feature 1..21: note = Description of Artificial Sequence: Synthetic oligonucleotide
  source 1..21: mol_type = other DNA
tggacttctacccgagattcc

SEQ ID NO: 2458 - DNA, 21 bp, synthetic construct
  misc_feature 1..21: note = Description of Artificial Sequence: Synthetic oligonucleotide
  source 1..21: mol_type = other DNA
tggacttctacccgagattcc

SEQ ID NO: 2459 - DNA, 21 bp, synthetic construct
  misc_feature 1..21: note = Description of Artificial Sequence: Synthetic oligonucleotide
  source 1..21: mol_type = other DNA
tggacttctacccgagaatcc

SEQ ID NO: 2460 - DNA, 21 bp, synthetic construct
  misc_feature 1..21: note = Description of Artificial Sequence: Synthetic oligonucleotide
  source 1..21: mol_type = other DNA
tggacttctacccgagaatcc

SEQ ID NO: 2461 - DNA, 21 bp, synthetic construct
  misc_feature 1..21: note = Description of Artificial Sequence: Synthetic oligonucleotide
  source 1..21: mol_type = other DNA
tgggcatctacccgggaatcc

SEQ ID NO: 2462 - DNA, 21 bp, synthetic construct
  misc_feature 1..21: note = Description of Artificial Sequence: Synthetic oligonucleotide
  source 1..21: mol_type = other DNA
tgggcatctacccgggaatcc

SEQ ID NO: 2463 - DNA, 21 bp, synthetic construct
  misc_feature 1..21: note = Description of Artificial Sequence: Synthetic oligonucleotide
  source 1..21: mol_type = other DNA
tgggcatctacccgggaatcc

SEQ ID NO: 2464 - DNA, 21 bp, synthetic construct
  misc_feature 1..21: note = Description of Artificial Sequence: Synthetic oligonucleotide
  source 1..21: mol_type = other DNA
tgggcatctacccgggaatcc

SEQ ID NO: 2465 - DNA, 21 bp, synthetic construct
  misc_feature 1..21: note = Description of Artificial Sequence: Synthetic oligonucleotide
  source 1..21: mol_type = other DNA
tgggcatctacccgggaatcc

SEQ ID NO: 2466 - DNA, 21 bp, synthetic construct
  misc_feature 1..21: note = Description of Artificial Sequence: Synthetic oligonucleotide
  source 1..21: mol_type = other DNA
tggacttctacccgagattcc

SEQ ID NO: 2467 - DNA, 21 bp, synthetic construct
  misc_feature 1..21: note = Description of Artificial Sequence: Synthetic oligonucleotide
  source 1..21: mol_type = other DNA
tggacttctacccgagattcc

SEQ ID NO: 2468 - DNA, 21 bp, synthetic construct
  misc_feature 1..21: note = Description of Artificial Sequence: Synthetic oligonucleotide
  source 1..21: mol_type = other DNA
tggacttctacccgagattcc

SEQ ID NO: 2469 - DNA, 21 bp, synthetic construct
  misc_feature 1..21: note = Description of Artificial Sequence: Synthetic oligonucleotide
  source 1..21: mol_type = other DNA
tggacttctacccgagattcc

SEQ ID NO: 2470 - DNA, 21 bp, synthetic construct
  misc_feature 1..21: note = Description of Artificial Sequence: Synthetic oligonucleotide
  source 1..21: mol_type = other DNA
tggacttctacccgagattcc

SEQ ID NO: 2471 - DNA, 21 bp, synthetic construct
  misc_feature 1..21: note = Description of Artificial Sequence: Synthetic oligonucleotide
  source 1..21: mol_type = other DNA
tggacttctacccgagattcc

SEQ ID NO: 2472 - DNA, 21 bp, synthetic construct
  misc_feature 1..21: note = Description of Artificial Sequence: Synthetic oligonucleotide
  source 1..21: mol_type = other DNA
tggacttctacccgagattcc

SEQ ID NO: 2473 - DNA, 21 bp, synthetic construct
  misc_feature 1..21: note = Description of Artificial Sequence: Synthetic oligonucleotide
  source 1..21: mol_type = other DNA
tggacttctacccgagaatcc

SEQ ID NO: 2474 - DNA, 21 bp, synthetic construct
  misc_feature 1..21: note = Description of Artificial Sequence: Synthetic oligonucleotide
  source 1..21: mol_type = other DNA
tggacttctacccgagaatcc

SEQ ID NO: 2475 - DNA, 21 bp, synthetic construct
  misc_feature 1..21: note = Description of Artificial Sequence: Synthetic oligonucleotide
  source 1..21: mol_type = other DNA
tggacttctacccgagaatcc

SEQ ID NO: 2476 - DNA, 21 bp, synthetic construct
  misc_feature 1..21: note = Description of Artificial Sequence: Synthetic oligonucleotide
  source 1..21: mol_type = other DNA
tggacttctacccgagaatcc

SEQ ID NO: 2477 - DNA, 21 bp, synthetic construct
  misc_feature 1..21: note = Description of Artificial Sequence: Synthetic oligonucleotide
  source 1..21: mol_type = other DNA
tggacttctacccgagattcc

SEQ ID NO: 2478 - DNA, 21 bp, synthetic construct
  misc_feature 1..21: note = Description of Artificial Sequence: Synthetic oligonucleotide
  source 1..21: mol_type = other DNA
tggacttctacccgagaatcc

SEQ ID NO: 2479 - DNA, 21 bp, synthetic construct
  misc_feature 1..21: note = Description of Artificial Sequence: Synthetic oligonucleotide
  source 1..21: mol_type = other DNA
actaataatcagcggccctca

SEQ ID NO: 2480 - DNA, 21 bp, synthetic construct
  misc_feature 1..21: note = Description of Artificial Sequence: Synthetic oligonucleotide
  source 1..21: mol_type = other DNA
actaataatcagcggccctca

SEQ ID NO: 2481 - DNA, 21 bp, synthetic construct
  misc_feature 1..21: note = Description of Artificial Sequence: Synthetic oligonucleotide
  source 1..21: mol_type = other DNA
actaataatcagcggccctca

SEQ ID NO: 2482 - DNA, 21 bp, synthetic construct
  misc_feature 1..21: note = Description of Artificial Sequence: Synthetic oligonucleotide
  source 1..21: mol_type = other DNA
actaataatcagcggccctca

SEQ ID NO: 2483 - DNA, 21 bp, synthetic construct
  misc_feature 1..21: note = Description of Artificial Sequence: Synthetic oligonucleotide
  source 1..21: mol_type = other DNA
actaataatcagcggccctca

SEQ ID NO: 2484 - DNA, 21 bp, synthetic construct
  misc_feature 1..21: note = Description of Artificial Sequence: Synthetic oligonucleotide
  source 1..21: mol_type = other DNA
actaataatcagcggccctca

SEQ ID NO: 2485 - DNA, 21 bp, synthetic construct
  misc_feature 1..21: note = Description of Artificial Sequence: Synthetic oligonucleotide
  source 1..21: mol_type = other DNA
actaataatcagcggccctca

SEQ ID NO: 2486 - DNA, 21 bp, synthetic construct
  misc_feature 1..21: note = Description of Artificial Sequence: Synthetic oligonucleotide
  source 1..21: mol_type = other DNA
actaataatcagcggccctca

SEQ ID NO: 2487 - DNA, 21 bp, synthetic construct
  misc_feature 1..21: note = Description of Artificial Sequence: Synthetic oligonucleotide
  source 1..21: mol_type = other DNA
actaataatcagcggccctca

SEQ ID NO: 2488 - DNA, 21 bp, synthetic construct
  misc_feature 1..21: note = Description of Artificial Sequence: Synthetic oligonucleotide
  source 1..21: mol_type = other DNA
actaataatcagcggccctca

SEQ ID NO: 2489 - DNA, 21 bp, synthetic construct
  misc_feature 1..21: note = Description of Artificial Sequence: Synthetic oligonucleotide
  source 1..21: mol_type = other DNA
actaataatcagcggccctca

SEQ ID NO: 2490 - DNA, 21 bp, synthetic construct
  misc_feature 1..21: note = Description of Artificial Sequence: Synthetic oligonucleotide
  source 1..21: mol_type = other DNA
actaataatcagcggccctca

SEQ ID NO: 2491 - DNA, 21 bp, synthetic construct
  misc_feature 1..21: note = Description of Artificial Sequence: Synthetic oligonucleotide
  source 1..21: mol_type = other DNA
actaataatcagcggccctca

SEQ ID NO: 2492 - DNA, 21 bp, synthetic construct
  misc_feature 1..21: note = Description of Artificial Sequence: Synthetic oligonucleotide
  source 1..21: mol_type = other DNA
actaataatcagcggccctca

SEQ ID NO: 2493 - DNA, 21 bp, synthetic construct
  misc_feature 1..21: note = Description of Artificial Sequence: Synthetic oligonucleotide
  source 1..21: mol_type = other DNA
ggtgcatccagtttgcaaagt

SEQ ID NO: 2494 - DNA, 21 bp, synthetic construct
  misc_feature 1..21: note = Description of Artificial Sequence: Synthetic oligonucleotide
  source 1..21: mol_type = other DNA
ggtgcatccagtttgcaaagt

SEQ ID NO: 2495 - DNA, 21 bp, synthetic construct
  misc_feature 1..21: note = Description of Artificial Sequence: Synthetic oligonucleotide
  source 1..21: mol_type = other DNA
actaataatcagcggccctca

SEQ ID NO: 2496 - DNA, 21 bp, synthetic construct
  misc_feature 1..21: note = Description of Artificial Sequence: Synthetic oligonucleotide
  source 1..21: mol_type = other DNA
gttgcatccagtttgcaaagt

SEQ ID NO: 2497 - DNA, 21 bp, synthetic construct
  misc_feature 1..21: note = Description of Artificial Sequence: Synthetic oligonucleotide
  source 1..21: mol_type = other DNA
gacaataataagcgaccctca

SEQ ID NO: 2498 - DNA, 21 bp, synthetic construct
  misc_feature 1..21: note = Description of Artificial Sequence: Synthetic oligonucleotide
  source 1..21: mol_type = other DNA
gttgcatccagtttgcaaagt

SEQ ID NO: 2499 - DNA, 21 bp, synthetic construct
  misc_feature 1..21: note = Description of Artificial Sequence: Synthetic oligonucleotide
  source 1..21: mol_type = other DNA
gttgcatccagtttgcaaagt

SEQ ID NO: 2500 - DNA, 21 bp, synthetic construct
  misc_feature 1..21: note = Description of Artificial Sequence: Synthetic oligonucleotide
  source 1..21: mol_type = other DNA
gttgcatccagtttgcaaagt

SEQ ID NO: 2501 - DNA, 21 bp, synthetic construct
  misc_feature 1..21: note = Description of Artificial Sequence: Synthetic oligonucleotide
  source 1..21: mol_type = other DNA
gttgcatccagtttgcaaagt

SEQ ID NO: 2502 - DNA, 21 bp, synthetic construct
  misc_feature 1..21: note = Description of Artificial Sequence: Synthetic oligonucleotide
  source 1..21: mol_type = other DNA
gttgcatccagtttgcaaagt

SEQ ID NO: 2503 - DNA, 21 bp, synthetic construct
  misc_feature 1..21: note = Description of Artificial Sequence: Synthetic oligonucleotide
  source 1..21: mol_type = other DNA
gttgcatccagtttgcaaagt

SEQ ID NO: 2504 - DNA, 21 bp, synthetic construct
  misc_feature 1..21: note = Description of Artificial Sequence: Synthetic oligonucleotide
  source 1..21: mol_type = other DNA
gacaataataagcgaccctca

SEQ ID NO: 2505 - DNA, 21 bp, synthetic construct
  misc_feature 1..21: note = Description of Artificial Sequence: Synthetic oligonucleotide
  source 1..21: mol_type = other DNA
gacaataataagcgaccctca

SEQ ID NO: 2506 - DNA, 21 bp, synthetic construct
  misc_feature 1..21: note = Description of Artificial Sequence: Synthetic oligonucleotide
  source 1..21: mol_type = other DNA
gacaataataagcgaccctca

SEQ ID NO: 2507 - DNA, 21 bp, synthetic construct
  misc_feature 1..21: note = Description of Artificial Sequence: Synthetic oligonucleotide
  source 1..21: mol_type = other DNA
gacaataataagcgaccctca

SEQ ID NO: 2508 - DNA, 21 bp, synthetic construct
  misc_feature 1..21: note = Description of Artificial Sequence: Synthetic oligonucleotide
  source 1..21: mol_type = other DNA
gacaataataagcgaccctca

SEQ ID NO: 2509 - DNA, 21 bp, synthetic construct
  misc_feature 1..21: note = Description of Artificial Sequence: Synthetic oligonucleotide
  source 1..21: mol_type = other DNA
gacaataataagcgaccctca

SEQ ID NO: 2510 - DNA, 21 bp, synthetic construct
  misc_feature 1..21: note = Description of Artificial Sequence: Synthetic oligonucleotide
  source 1..21: mol_type = other DNA
gacaataataagcgaccctca

SEQ ID NO: 2511 - DNA, 21 bp, synthetic construct
  misc_feature 1..21: note = Description of Artificial Sequence: Synthetic oligonucleotide
  source 1..21: mol_type = other DNA
gacaataataagcgaccctca

SEQ ID NO: 2512 - DNA, 21 bp, synthetic construct
  misc_feature 1..21: note = Description of Artificial Sequence: Synthetic oligonucleotide
  source 1..21: mol_type = other DNA
gttgcatccagtttgcaaagt

SEQ ID NO: 2513 - DNA, 33 bp, synthetic construct
  misc_feature 1..33: note = Description of Artificial Sequence: Synthetic oligonucleotide
  source 1..33: mol_type = other DNA
gcaacattcgatgacagcctgaatggtccggta

SEQ ID NO: 2514 - DNA, 27 bp, synthetic construct
  misc_feature 1..27: note = Description of Artificial Sequence: Synthetic oligonucleotide
  source 1..27: mol_type = other DNA
ctacagcataataattaccccttcact

SEQ ID NO: 2515 - DNA, 27 bp, synthetic construct
  misc_feature 1..27: note = Description of Artificial Sequence: Synthetic oligonucleotide
  source 1..27: mol_type = other DNA
ctacagcataataattaccccttcact

SEQ ID NO: 2516 - DNA, 24 bp, synthetic construct
  misc_feature 1..24: note = Description of Artificial Sequence: Synthetic oligonucleotide
  source 1..24: mol_type = other DNA
caacagtatgatattctcctcact

SEQ ID NO: 2517 - DNA, 27 bp, synthetic construct
  misc_feature 1..27: note = Description of Artificial Sequence: Synthetic oligonucleotide
  source 1..27: mol_type = other DNA
caacaatattatagtactccgtggacg

SEQ ID NO: 2518 - DNA, 27 bp, synthetic construct
  misc_feature 1..27: note = Description of Artificial Sequence: Synthetic oligonucleotide
  source 1..27: mol_type = other DNA
caacaatattatagtactccgtggacg

SEQ ID NO: 2519 - DNA, 27 bp, synthetic construct
  misc_feature 1..27: note = Description of Artificial Sequence: Synthetic oligonucleotide
  source 1..27: mol_type = other DNA
cagcaatattatcgtactccgtggacg

SEQ ID NO: 2520 - DNA, 27 bp, synthetic construct
  misc_feature 1..27: note = Description of Artificial Sequence: Synthetic oligonucleotide
  source 1..27: mol_type = other DNA
cagcaatattatcgtactccgtggacg

SEQ ID NO: 2521 - DNA, 27 bp, synthetic construct
  misc_feature 1..27: note = Description of Artificial Sequence: Synthetic oligonucleotide
  source 1..27: mol_type = other DNA
cagcagtatggtagttcaccgctcact

SEQ ID NO: 2522 - DNA, 27 bp, synthetic construct
  misc_feature 1..27: note = Description of Artificial Sequence: Synthetic oligonucleotide
  source 1..27: mol_type = other DNA
cagcagtataataactggcctctcact

SEQ ID NO: 2523 - DNA, 27 bp, synthetic construct
  misc_feature 1..27: note = Description of Artificial Sequence: Synthetic oligonucleotide
  source 1..27: mol_type = other DNA
ctacagcataatagttacccattcact

SEQ ID NO: 2524 - DNA, 24 bp, synthetic construct
  misc_feature 1..24: note = Description of Artificial Sequence: Synthetic oligonucleotide
  source 1..24: mol_type = other DNA
caacagtatgatgatctattcact

SEQ ID NO: 2525 - DNA, 27 bp, synthetic construct
  misc_feature 1..27: note = Description of Artificial Sequence: Synthetic oligonucleotide
  source 1..27: mol_type = other DNA
caacagactaacagtttccctccgacg

SEQ ID NO: 2526 - DNA, 27 bp, synthetic construct
  misc_feature 1..27: note = Description of Artificial Sequence: Synthetic oligonucleotide
  source 1..27: mol_type = other DNA
caacagactaacagtttccctccgacg

SEQ ID NO: 2527 - DNA, 27 bp, synthetic construct
  misc_feature 1..27: note = Description of Artificial Sequence: Synthetic oligonucleotide
  source 1..27: mol_type = other DNA
ctacagcataatagttacccattcact

SEQ ID NO: 2528 - DNA, 27 bp, synthetic construct
  misc_feature 1..27: note = Description of Artificial Sequence: Synthetic oligonucleotide
  source 1..27: mol_type = other DNA
ctacagcataatagttacccattcact

SEQ ID NO: 2529 - DNA, 27 bp, synthetic construct
  misc_feature 1..27: note = Description of Artificial Sequence: Synthetic oligonucleotide
  source 1..27: mol_type = other DNA
ctacagcataatagttacccattcact

SEQ ID NO: 2530 - DNA, 27 bp, synthetic construct
  misc_feature 1..27: note = Description of Artificial Sequence: Synthetic oligonucleotide
  source 1..27: mol_type = other DNA
ctacagcataatagttacccattcact

SEQ ID NO: 2531 - DNA, 27 bp, synthetic construct
  misc_feature 1..27: note = Description of Artificial Sequence: Synthetic oligonucleotide
  source 1..27: mol_type = other DNA
ctacagcataatagttacccattcact

SEQ ID NO: 2532 - DNA, 27 bp, synthetic construct
  misc_feature 1..27: note = Description of Artificial Sequence: Synthetic oligonucleotide
  source 1..27: mol_type = other DNA
ctacagcataatagttacccattcact

SEQ ID NO: 2533 - DNA, 27 bp, synthetic construct
  misc_feature 1..27: note = Description of Artificial Sequence: Synthetic oligonucleotide
  source 1..27: mol_type = other DNA
ctacagcataataattaccccttcact

SEQ ID NO: 2534 - DNA, 27 bp, synthetic construct
  misc_feature 1..27: note = Description of Artificial Sequence: Synthetic oligonucleotide
  source 1..27: mol_type = other DNA
ctacagcataataattaccccttcact

SEQ ID NO: 2535 - DNA, 27 bp, synthetic construct
  misc_feature 1..27: note = Description of Artificial Sequence: Synthetic oligonucleotide
  source 1..27: mol_type = other DNA
ctacagcataataattaccccttcact

SEQ ID NO: 2536 - DNA, 27 bp, synthetic construct
  misc_feature 1..27: note = Description of Artificial Sequence: Synthetic oligonucleotide
  source 1..27: mol_type = other DNA
ctacagcataataattaccccttcact

SEQ ID NO: 2537 - DNA, 27 bp, synthetic construct
  misc_feature 1..27: note = Description of Artificial Sequence: Synthetic oligonucleotide
  source 1..27: mol_type = other DNA
ctacagcataataattaccccttcact

SEQ ID NO: 2538 - DNA, 27 bp, synthetic construct
  misc_feature 1..27: note = Description of Artificial Sequence: Synthetic oligonucleotide
  source 1..27: mol_type = other DNA
ctacagcataataattaccccttcact

SEQ ID NO: 2539 - DNA, 27 bp, synthetic construct
  misc_feature 1..27: note = Description of Artificial Sequence: Synthetic oligonucleotide
  source 1..27: mol_type = other DNA
ctacagcataataattaccccttcact

SEQ ID NO: 2540 - DNA, 27 bp, synthetic construct
  misc_feature 1..27: note = Description of Artificial Sequence: Synthetic oligonucleotide
  source 1..27: mol_type = other DNA
ctacagcataataattaccccttcact

SEQ ID NO: 2541 - DNA, 27 bp, synthetic construct
  misc_feature 1..27: note = Description of Artificial Sequence: Synthetic oligonucleotide
  source 1..27: mol_type = other DNA
ctacagcataataattaccccttcact

SEQ ID NO: 2542 - DNA, 27 bp, synthetic construct
  misc_feature 1..27: note = Description of Artificial Sequence: Synthetic oligonucleotide
  source 1..27: mol_type = other DNA
ctacagcataataattaccccttcact

SEQ ID NO: 2543 - DNA, 27 bp, synthetic construct
  misc_feature 1..27: note = Description of Artificial Sequence: Synthetic oligonucleotide
  source 1..27: mol_type = other DNA
ctacagcataataattaccccttcact

SEQ ID NO: 2544 - DNA, 27 bp, synthetic construct
  misc_feature 1..27: note = Description of Artificial Sequence: Synthetic oligonucleotide
  source 1..27: mol_type = other DNA
ctacagcataataattaccccttcact

SEQ ID NO: 2545 - DNA, 27 bp, synthetic construct
  misc_feature 1..27: note = Description of Artificial Sequence: Synthetic oligonucleotide
  source 1..27: mol_type = other DNA
ctacagcataataattaccccttcact

SEQ ID NO: 2546 - DNA, 27 bp, synthetic construct
  misc_feature 1..27: note = Description of Artificial Sequence: Synthetic oligonucleotide
  source 1..27: mol_type = other DNA
ctacagcataataattaccccttcact

SEQ ID NO: 2547 - DNA, 27 bp, synthetic construct
  misc_feature 1..27: note = Description of Artificial Sequence: Synthetic oligonucleotide
  source 1..27: mol_type = other DNA
ctacagcataataattaccccttcact

SEQ ID NO: 2548 - DNA, 27 bp, synthetic construct
  misc_feature 1..27: note = Description of Artificial Sequence: Synthetic oligonucleotide
  source 1..27: mol_type = other DNA
ctacagcataataattaccccttcact

SEQ ID NO: 2549 - DNA, 27 bp, synthetic construct
  misc_feature 1..27: note = Description of Artificial Sequence: Synthetic oligonucleotide
  source 1..27: mol_type = other DNA
ctacagcataataattaccccttcact

SEQ ID NO: 2550 - DNA, 27 bp, synthetic construct
  misc_feature 1..27: note = Description of Artificial Sequence: Synthetic oligonucleotide
  source 1..27: mol_type = other DNA
ctacagcataataattaccccttcact

SEQ ID NO: 2551 - DNA, 27 bp, synthetic construct
  misc_feature 1..27: note = Description of Artificial Sequence: Synthetic oligonucleotide
  source 1..27: mol_type = other DNA
ctacagcataataattaccccttcact

SEQ ID NO: 2552 - DNA, 24 bp, synthetic construct
  misc_feature 1..24: note = Description of Artificial Sequence: Synthetic oligonucleotide
  source 1..24: mol_type = other DNA
caacagtatgatattctcctcact

SEQ ID NO: 2553 - DNA, 24 bp, synthetic construct
  misc_feature 1..24: note = Description of Artificial Sequence: Synthetic oligonucleotide
  source 1..24: mol_type = other DNA
caacagtatgatattctcctcact

SEQ ID NO: 2554 - DNA, 24 bp, synthetic construct
  misc_feature 1..24: note = Description of Artificial Sequence: Synthetic oligonucleotide
  source 1..24: mol_type = other DNA
caacagtatgatattctcctcact

SEQ ID NO: 2555 - DNA, 24 bp, synthetic construct
  misc_feature 1..24: note = Description of Artificial Sequence: Synthetic oligonucleotide
  source 1..24: mol_type = other DNA
caacagtatgatattctcctcact

SEQ ID NO: 2556 - DNA, 24 bp, synthetic construct
  misc_feature 1..24: note = Description of Artificial Sequence: Synthetic oligonucleotide
  source 1..24: mol_type = other DNA
caacagtatgatattctcctcact

SEQ ID NO: 2557 - DNA, 24 bp, synthetic construct
  misc_feature 1..24: note = Description of Artificial Sequence: Synthetic oligonucleotide
  source 1..24: mol_type = other DNA
caacagtatgatattctcctcact

SEQ ID NO: 2558 - DNA, 24 bp, synthetic construct
  misc_feature 1..24: note = Description of Artificial Sequence: Synthetic oligonucleotide
  source 1..24: mol_type = other DNA
caacagtatgatattctcctcact

SEQ ID NO: 2559 - DNA, 24 bp, synthetic construct
  misc_feature 1..24: note = Description of Artificial Sequence: Synthetic oligonucleotide
  source 1..24: mol_type = other DNA
caacagtatgatattctcctcact

SEQ ID NO: 2560 - DNA, 24 bp, synthetic construct
  misc_feature 1..24: note = Description of Artificial Sequence: Synthetic oligonucleotide
  source 1..24: mol_type = other DNA
caacagtatgatattctcctcact

SEQ ID NO: 2561 - DNA, 27 bp, synthetic construct
  misc_feature 1..27: note = Description of Artificial Sequence: Synthetic oligonucleotide
  source 1..27: mol_type = other DNA
ctacagcataataattaccccttcact

SEQ ID NO: 2562 - DNA, 27 bp, synthetic construct
  misc_feature 1..27: note = Description of Artificial Sequence: Synthetic oligonucleotide
  source 1..27: mol_type = other DNA
ctacagcataataattaccccttcact

SEQ ID NO: 2563 - DNA, 27 bp, synthetic construct
  misc_feature 1..27: note = Description of Artificial Sequence: Synthetic oligonucleotide
  source 1..27: mol_type = other DNA
ctacagcataataattaccccttcact

SEQ ID NO: 2564 - DNA, 27 bp, synthetic construct
  misc_feature 1..27: note = Description of Artificial Sequence: Synthetic oligonucleotide
  source 1..27: mol_type = other DNA
ctacagcataataattaccccttcact

SEQ ID NO: 2565 - DNA, 27 bp, synthetic construct
  misc_feature 1..27: note = Description of Artificial Sequence: Synthetic oligonucleotide
  source 1..27: mol_type = other DNA
ctacagcataataattaccccttcact

SEQ ID NO: 2566 - DNA, 27 bp, synthetic construct
  misc_feature 1..27: note = Description of Artificial Sequence: Synthetic oligonucleotide
  source 1..27: mol_type = other DNA
ctacagcataataattaccccttcact

SEQ ID NO: 2567 - DNA, 27 bp, synthetic construct
  misc_feature 1..27: note = Description of Artificial Sequence: Synthetic oligonucleotide
  source 1..27: mol_type = other DNA
ctacagcataataattaccccttcact

SEQ ID NO: 2568 - DNA, 24 bp, synthetic construct
  misc_feature 1..24: note = Description of Artificial Sequence: Synthetic oligonucleotide
  source 1..24: mol_type = other DNA
caacagtatgatgatctattcact

SEQ ID NO: 2569 - DNA, 24 bp, synthetic construct
  misc_feature 1..24: note = Description of Artificial Sequence: Synthetic oligonucleotide
  source 1..24: mol_type = other DNA
caacagtatgatgatctattcact

SEQ ID NO: 2570 - DNA, 24 bp, synthetic construct
  misc_feature 1..24: note = Description of Artificial Sequence: Synthetic oligonucleotide
  source 1..24: mol_type = other DNA
caacagtatgatgatctattcact

SEQ ID NO: 2571 - DNA, 24 bp, synthetic construct
  misc_feature 1..24: note = Description of Artificial Sequence: Synthetic oligonucleotide
  source 1..24: mol_type = other DNA
caacagtatgatgatctattcact

SEQ ID NO: 2572 - DNA, 24 bp, synthetic construct
  misc_feature 1..24: note = Description of Artificial Sequence: Synthetic oligonucleotide
  source 1..24: mol_type = other DNA
caacagtatgatgatctattcact

SEQ ID NO: 2573 - DNA, 24 bp, synthetic construct
  misc_feature 1..24: note = Description of Artificial Sequence: Synthetic oligonucleotide
  source 1..24: mol_type = other DNA
caacagtatgatgatctattcact

SEQ ID NO: 2574 - DNA, 24 bp, synthetic construct
  misc_feature 1..24: note = Description of Artificial Sequence: Synthetic oligonucleotide
  source 1..24: mol_type = other DNA
caacagtatgatgatctattcact

SEQ ID NO: 2575 - DNA, 24 bp, synthetic construct
  misc_feature 1..24: note = Description of Artificial Sequence: Synthetic oligonucleotide
  source 1..24: mol_type = other DNA
caacagtatgatgatctattcact

SEQ ID NO: 2576 - DNA, 24 bp, synthetic construct
  misc_feature 1..24: note = Description of Artificial Sequence: Synthetic oligonucleotide
  source 1..24: mol_type = other DNA
caacagtatgatgatctattcact

SEQ ID NO: 2577 - DNA, 24 bp, synthetic construct
  misc_feature 1..24: note = Description of Artificial Sequence: Synthetic oligonucleotide
  source 1..24: mol_type = other DNA
caacagtatgatgatctattcact

SEQ ID NO: 2578 - DNA, 24 bp, synthetic construct
  misc_feature 1..24: note = Description of Artificial Sequence: Synthetic oligonucleotide
  source 1..24: mol_type = other DNA
caacagtatgatgatctattcact

SEQ ID NO: 2579 - DNA, 24 bp, synthetic construct
  misc_feature 1..24: note = Description of Artificial Sequence: Synthetic oligonucleotide
  source 1..24: mol_type = other DNA
cagcagtatggtagctcacctcgc

SEQ ID NO: 2580 - DNA, 24 bp, synthetic construct
  misc_feature 1..24: note = Description of Artificial Sequence: Synthetic oligonucleotide
  source 1..24: mol_type = other DNA
cagcagtatggtagctcacctcgc

SEQ ID NO: 2581 - DNA, 24 bp, synthetic construct
  misc_feature 1..24: note = Description of Artificial Sequence: Synthetic oligonucleotide
  source 1..24: mol_type = other DNA
cagcagtatggtagctcacctcgc

SEQ ID NO: 2582 - DNA, 24 bp, synthetic construct
  misc_feature 1..24: note = Description of Artificial Sequence: Synthetic oligonucleotide
  source 1..24: mol_type = other DNA
cagcagtatggtagctcacctcgc

SEQ ID NO: 2583 - DNA, 27 bp, synthetic construct
  misc_feature 1..27: note = Description of Artificial Sequence: Synthetic oligonucleotide
  source 1..27: mol_type = other DNA
cagcagtataataactggcctctcact

SEQ ID NO: 2584 - DNA, 27 bp, synthetic construct
  misc_feature 1..27: note = Description of Artificial Sequence: Synthetic oligonucleotide
  source 1..27: mol_type = other DNA
cagcagtataataactggcctctcact

SEQ ID NO: 2585 - DNA, 27 bp, synthetic construct
  misc_feature 1..27: note = Description of Artificial Sequence: Synthetic oligonucleotide
  source 1..27: mol_type = other DNA
cagcagtataataactggcctctcact

SEQ ID NO: 2586 - DNA, 27 bp, synthetic construct
  misc_feature 1..27: note = Description of Artificial Sequence: Synthetic oligonucleotide
  source 1..27: mol_type = other DNA
cagcagtataataactggcctctcact

SEQ ID NO: 2587 - DNA, 27 bp, synthetic construct
  misc_feature 1..27: note = Description of Artificial Sequence: Synthetic oligonucleotide
  source 1..27: mol_type = other DNA
cagcagtataataacttccctctcact

SEQ ID NO: 2588 - DNA, 27 bp, synthetic construct
  misc_feature 1..27: note = Description of Artificial Sequence: Synthetic oligonucleotide
  source 1..27: mol_type = other DNA
cagcagtataataactatcctctcact

SEQ ID NO: 2589 - DNA, 27 bp, synthetic construct
  misc_feature 1..27: note = Description of Artificial Sequence: Synthetic oligonucleotide
  source 1..27: mol_type = other DNA
cagcagtataataactggcctctcact

SEQ ID NO: 2590 - DNA, 27 bp, synthetic construct
  misc_feature 1..27: note = Description of Artificial Sequence: Synthetic oligonucleotide
  source 1..27: mol_type = other DNA
cagcagtataataactggcctctcact

SEQ ID NO: 2591 - DNA, 27 bp, synthetic construct
  misc_feature 1..27: note = Description of Artificial Sequence: Synthetic oligonucleotide
  source 1..27: mol_type = other DNA
cagcagtatggtagttcaccgctcact

SEQ ID NO: 2592 - DNA, 27 bp, synthetic construct
  misc_feature 1..27: note = Description of Artificial Sequence: Synthetic oligonucleotide
  source 1..27: mol_type = other DNA
cagcagtatggtagttcaccgctcact

SEQ ID NO: 2593 - DNA, 27 bp, synthetic construct
  misc_feature 1..27: note = Description of Artificial Sequence: Synthetic oligonucleotide
  source 1..27: mol_type = other DNA
cagcagtatggtagttcaccgctcact

SEQ ID NO: 2594 - DNA, 27 bp, synthetic construct
  misc_feature 1..27: note = Description of Artificial Sequence: Synthetic oligonucleotide
  source 1..27: mol_type = other DNA
cagcagtatggtagttcaccgctcact

SEQ ID NO: 2595 - DNA, 27 bp, synthetic construct
  misc_feature 1..27: note = Description of Artificial Sequence: Synthetic oligonucleotide
  source 1..27: mol_type = other DNA
cagcagtatggtagttcaccgctcact

SEQ ID NO: 2596 - DNA, 27 bp, synthetic construct
  misc_feature 1..27: note = Description of Artificial Sequence: Synthetic oligonucleotide
  source 1..27: mol_type = other DNA
cagcagtatggtagttcaccgctcact

SEQ ID NO: 2597 - DNA, 27 bp, synthetic construct
  misc_feature 1..27: note = Description of Artificial Sequence: Synthetic oligonucleotide
  source 1..27: mol_type = other DNA
cagcagtatggtagttcaccgctcact

SEQ ID NO: 2598 - DNA, 27 bp, synthetic construct
  misc_feature 1..27: note = Description of Artificial Sequence: Synthetic oligonucleotide
  source 1..27: mol_type = other DNA
caacaatattatagtactccgtggacg

SEQ ID NO: 2599 - DNA, 27 bp, synthetic construct
  misc_feature 1..27: note = Description of Artificial Sequence: Synthetic oligonucleotide
  source 1..27: mol_type = other DNA
caacaatattatagtactccgtggacg

SEQ ID NO: 2600 - DNA, 27 bp, synthetic construct
  misc_feature 1..27: note = Description of Artificial Sequence: Synthetic oligonucleotide
  source 1..27: mol_type = other DNA
caacaatattatagtactccgtggacg

SEQ ID NO: 2601 - DNA, 27 bp, synthetic construct
  misc_feature 1..27: note = Description of Artificial Sequence: Synthetic oligonucleotide
  source 1..27: mol_type = other DNA
caacaatattatagtactccgtggacg

SEQ ID NO: 2602 - DNA, 27 bp, synthetic construct
  misc_feature 1..27: note = Description of Artificial Sequence: Synthetic oligonucleotide
  source 1..27: mol_type = other DNA
caacaatattatagtactccgtggacg

SEQ ID NO: 2603 - DNA, 27 bp, synthetic construct
  misc_feature 1..27: note = Description of Artificial Sequence: Synthetic oligonucleotide
  source 1..27: mol_type = other DNA
caacaatattatagtactccgtggacg

SEQ ID NO: 2604 - DNA, 27 bp, synthetic construct
  misc_feature 1..27: note = Description of Artificial Sequence: Synthetic oligonucleotide
  source 1..27: mol_type = other DNA
caacaatattatagtactccgtggacg

SEQ ID NO: 2605 - DNA, 27 bp, synthetic construct
  misc_feature 1..27: note = Description of Artificial Sequence: Synthetic oligonucleotide
  source 1..27: mol_type = other DNA
caacaatattatagtactccgtggacg

SEQ ID NO: 2606 - DNA, 27 bp, synthetic construct
  misc_feature 1..27: note = Description of Artificial Sequence: Synthetic oligonucleotide
  source 1..27: mol_type = other DNA
caacaatattatagtactccgtggacg

SEQ ID NO: 2607 - DNA, 27 bp, synthetic construct
  misc_feature 1..27: note = Description of Artificial Sequence: Synthetic oligonucleotide
  source 1..27: mol_type = other DNA
caacaatattatagtactccgtggacg

SEQ ID NO: 2608 - DNA, 27 bp, synthetic construct
  misc_feature 1..27: note = Description of Artificial Sequence: Synthetic oligonucleotide
  source 1..27: mol_type = other DNA
caacaatattatagtactccgtggacg

SEQ ID NO: 2609 - DNA, 27 bp, synthetic construct
  misc_feature 1..27: note = Description of Artificial Sequence: Synthetic oligonucleotide
  source 1..27: mol_type = other DNA
cagcaatattatcgtactccgtggacg

SEQ ID NO: 2610 - DNA, 27 bp, synthetic construct
  misc_feature 1..27: note = Description of Artificial Sequence: Synthetic oligonucleotide
  source 1..27: mol_type = other DNA
cagcaatattatcgtactccgtggacg

SEQ ID NO: 2611 - DNA, 27 bp, synthetic construct
  misc_feature 1..27: note = Description of Artificial Sequence: Synthetic oligonucleotide
  source 1..27: mol_type = other DNA
cagcaatattatcgtactccgtggacg

SEQ ID NO: 2612 - DNA, 27 bp, synthetic construct
  misc_feature 1..27: note = Description of Artificial Sequence: Synthetic oligonucleotide
  source 1..27: mol_type = other DNA
cagcaatattatcgtactccgtggacg

SEQ ID NO: 2613 - DNA, 27 bp, synthetic construct
  misc_feature 1..27: note = Description of Artificial Sequence: Synthetic oligonucleotide
  source 1..27: mol_type = other DNA
cagcaatattatcgtactccgtggacg

SEQ ID NO: 2614 - DNA, 27 bp, synthetic construct
  misc_feature 1..27: note = Description of Artificial Sequence: Synthetic oligonucleotide
  source 1..27: mol_type = other DNA
cagcaatattatcgtactccgtggacg

SEQ ID NO: 2615 - DNA, 27 bp, synthetic construct
  misc_feature 1..27: note = Description of Artificial Sequence: Synthetic oligonucleotide
  source 1..27: mol_type = other DNA
cagcaatattatcgtactccgtggacg

SEQ ID NO: 2616 - DNA, 27 bp, synthetic construct
  misc_feature 1..27: note = Description of Artificial Sequence: Synthetic oligonucleotide
  source 1..27: mol_type = other DNA
cagcaatattatcgtactccgtggacg

SEQ ID NO: 2617 - DNA, 27 bp, synthetic construct
  misc_feature 1..27: note = Description of Artificial Sequence: Synthetic oligonucleotide
  source 1..27: mol_type = other DNA
cagcaatattatcgtactccgtggacg

SEQ ID NO: 2618 - DNA, 27 bp, synthetic construct
  misc_feature 1..27: note = Description of Artificial Sequence: Synthetic oligonucleotide
  source 1..27: mol_type = other DNA
caacaatattatagtactccgtggacg

SEQ ID NO: 2619 - DNA, 27 bp, synthetic construct
  misc_feature 1..27: note = Description of Artificial Sequence: Synthetic oligonucleotide
  source 1..27: mol_type = other DNA
caacaatattatagtactccgtggacg

SEQ ID NO: 2620 - DNA, 27 bp, synthetic construct
  misc_feature 1..27: note = Description of Artificial Sequence: Synthetic oligonucleotide
  source 1..27: mol_type = other DNA
caacaatattatagtactccgtggacg

SEQ ID NO: 2621 - DNA, 27 bp, synthetic construct
  misc_feature 1..27: note = Description of Artificial Sequence: Synthetic oligonucleotide
  source 1..27: mol_type = other DNA
caacaatattatagtactccgtggacg

SEQ ID NO: 2622 - DNA, 27 bp, synthetic construct
  misc_feature 1..27: note = Description of Artificial Sequence: Synthetic oligonucleotide
  source 1..27: mol_type = other DNA
caacaatattatagtactccgtggacg

SEQ ID NO: 2623 - DNA, 27 bp, synthetic construct
  misc_feature 1..27: note = Description of Artificial Sequence: Synthetic oligonucleotide
  source 1..27: mol_type = other DNA
cagcaatattatcgtactccgtggacg

SEQ ID NO: 2624 - DNA, 27 bp, synthetic construct
  misc_feature 1..27: note = Description of Artificial Sequence: Synthetic oligonucleotide
  source 1..27: mol_type = other DNA
cagcaatattatcgtactccgtggacg

SEQ ID NO: 2625 - DNA, 27 bp, synthetic construct
  misc_feature 1..27: note = Description of Artificial Sequence: Synthetic oligonucleotide
  source 1..27: mol_type = other DNA
cagcaatattatcgtactccgtggacg

SEQ ID NO: 2626 - DNA, 27 bp, synthetic construct
  misc_feature 1..27: note = Description of Artificial Sequence: Synthetic oligonucleotide
  source 1..27: mol_type = other DNA
cagcaatattatcgtactccgtggacg

SEQ ID NO: 2627 - DNA, 27 bp, synthetic construct
  misc_feature 1..27: note = Description of Artificial Sequence: Synthetic oligonucleotide
  source 1..27: mol_type = other DNA
cagcaatattatcgtactccgtggacg

SEQ ID NO: 2628 - DNA, 27 bp, synthetic construct
  misc_feature 1..27: note = Description of Artificial Sequence: Synthetic oligonucleotide
  source 1..27: mol_type = other DNA
cagcaatattatcgtactccgtggacg

SEQ ID NO: 2629 - DNA, 27 bp, synthetic construct
  misc_feature 1..27: note = Description of Artificial Sequence: Synthetic oligonucleotide
  source 1..27: mol_type = other DNA
cagcaatattatcgtactccgtggacg

SEQ ID NO: 2630 - DNA, 27 bp, synthetic construct
  misc_feature 1..27: note = Description of Artificial Sequence: Synthetic oligonucleotide
  source 1..27: mol_type = other DNA
cagcaatattatcgtactccgtggacg

SEQ ID NO: 2631 - DNA, 27 bp, synthetic construct
  misc_feature 1..27: note = Description of Artificial Sequence: Synthetic oligonucleotide
  source 1..27: mol_type = other DNA
cagcaatattatcgtactccgtggacg

SEQ ID NO: 2632 - DNA, 27 bp, synthetic construct
  misc_feature 1..27: note = Description of Artificial Sequence: Synthetic oligonucleotide
  source 1..27: mol_type = other DNA
cagcaatattatcgtactccgtggacg

SEQ ID NO: 2633 - DNA, 27 bp, synthetic construct
  misc_feature 1..27: note = Description of Artificial Sequence: Synthetic oligonucleotide
  source 1..27: mol_type = other DNA
cagcaatattatcgtactccgtggacg

SEQ ID NO: 2634 - DNA, 27 bp, synthetic construct
  misc_feature 1..27: note = Description of Artificial Sequence: Synthetic oligonucleotide
  source 1..27: mol_type = other DNA
cagcaatattatcgtactccgtggacg

SEQ ID NO: 2635 - DNA, 27 bp, synthetic construct
  misc_feature 1..27: note = Description of Artificial Sequence: Synthetic oligonucleotide
  source 1..27: mol_type = other DNA
cagcaatattatcgtactccgtggacg

SEQ ID NO: 2636 - DNA, 33 bp, synthetic construct
  misc_feature 1..33: note = Description of Artificial Sequence: Synthetic oligonucleotide
  source 1..33: mol_type = other DNA
gcaacattcgatgaaagcctgagtggtccggta

SEQ ID NO: 2637 - DNA, 33 bp, synthetic construct
  misc_feature 1..33: note = Description of Artificial Sequence: Synthetic oligonucleotide
  source 1..33: mol_type = other DNA
gcaacattcgatgaaagcctgcaaggtccggta

SEQ ID NO: 2638 - DNA, 33 bp, synthetic construct; identical to SEQ ID NO: 2636
  misc_feature 1..33: note = Description of Artificial Sequence: Synthetic oligonucleotide
  source 1..33: mol_type = other DNA

SEQ ID NO: 2639 - DNA, 33 bp, synthetic construct; identical to SEQ ID NO: 2637
  misc_feature 1..33: note = Description of Artificial Sequence: Synthetic oligonucleotide
  source 1..33: mol_type = other DNA

SEQ ID NO: 2640 - DNA, 33 bp, synthetic construct; identical to SEQ ID NO: 2513
  misc_feature 1..33: note = Description of Artificial Sequence: Synthetic oligonucleotide
  source 1..33: mol_type = other DNA

SEQ ID NO: 2641 - DNA, 33 bp, synthetic construct; identical to SEQ ID NO: 2513
  misc_feature 1..33: note = Description of Artificial Sequence: Synthetic oligonucleotide
  source 1..33: mol_type = other DNA

SEQ ID NO: 2642 - DNA, 33 bp, synthetic construct
  misc_feature 1..33: note = Description of Artificial Sequence: Synthetic oligonucleotide
  source 1..33: mol_type = other DNA
gcaacattcgatgaaagcctgaatggtccggta

SEQ ID NO: 2643 - DNA, 33 bp, synthetic construct
  misc_feature 1..33: note = Description of Artificial Sequence: Synthetic oligonucleotide
  source 1..33: mol_type = other DNA
gcaacattcgatgacagcctgcaaggtccggta

SEQ ID NO: 2644 - DNA, 33 bp, synthetic construct
  misc_feature 1..33: note = Description of Artificial Sequence: Synthetic oligonucleotide
  source 1..33: mol_type = other DNA
gcaacattcgatgacagcctgagtggtccggta

SEQ ID NO: 2645 - DNA, 33 bp, synthetic construct
  misc_feature 1..33: note = Description of Artificial Sequence: Synthetic oligonucleotide
  source 1..33: mol_type = other DNA
gcaacattcgatgacagcctgaatgctccggta

SEQ ID NO: 2646 - DNA, 33 bp, synthetic construct
  misc_feature 1..33: note = Description of Artificial Sequence: Synthetic oligonucleotide
  source 1..33: mol_type = other DNA
gcaacattcgatagcagcctgaatggtccggta

SEQ ID NO: 2647 - DNA, 33 bp, synthetic construct
  misc_feature 1..33: note = Description of Artificial Sequence: Synthetic oligonucleotide
  source 1..33: mol_type = other DNA
gcaacattcgatagcagcctgaatgctccggta

SEQ ID NO: 2648 - DNA, 33 bp, synthetic construct; identical to SEQ ID NO: 2647
  misc_feature 1..33: note = Description of Artificial Sequence: Synthetic oligonucleotide
  source 1..33: mol_type = other DNA

SEQ ID NO: 2649 - DNA, 33 bp, synthetic construct; identical to SEQ ID NO: 2636
  misc_feature 1..33: note = Description of Artificial Sequence: Synthetic oligonucleotide
  source 1..33: mol_type = other DNA

SEQ ID NO: 2650 - DNA, 27 bp, synthetic construct
  misc_feature 1..27: note = Description of Artificial Sequence: Synthetic oligonucleotide
  source 1..27: mol_type = other DNA
ctacagcataataattaccccttcact

SEQ ID NO: 2651 - DNA, 27 bp, synthetic construct
  misc_feature 1..27: note = Description of Artificial Sequence: Synthetic oligonucleotide
  source 1..27: mol_type = other DNA
ctacagcataataattaccccttcact

SEQ ID NO: 2652 - DNA, 33 bp, synthetic construct
  misc_feature 1..33: note = Description of Artificial Sequence: Synthetic oligonucleotide
  source 1..33: mol_type = other DNA
gcaacattcgatagcagcctgagtggtccggta

SEQ ID NO: 2653 - DNA, 27 bp, synthetic construct
  misc_feature 1..27: note = Description of Artificial Sequence: Synthetic oligonucleotide
  source 1..27: mol_type = other DNA
caacagagttacagtaccctgatcagt

SEQ ID NO: 2654 - DNA, 33 bp, synthetic construct
  misc_feature 1..33: note = Description of Artificial Sequence: Synthetic oligonucleotide
  source 1..33: mol_type = other DNA
ggaacatgggatagcagcctgagtgctgtggta

SEQ ID NO: 2655 - DNA, 27 bp, synthetic construct
  misc_feature 1..27: note = Description of Artificial Sequence: Synthetic oligonucleotide
  source 1..27: mol_type = other DNA
caacagagttacagtaccctgatcagt

SEQ ID NO: 2656 - DNA, 27 bp, synthetic construct
  misc_feature 1..27: note = Description of Artificial Sequence: Synthetic oligonucleotide
  source 1..27: mol_type = other DNA
caacagagttacagtaccctgatcagt

SEQ ID NO: 2657 - DNA, 27 bp, synthetic construct
  misc_feature 1..27: note = Description of Artificial Sequence: Synthetic oligonucleotide
  source 1..27: mol_type = other DNA
caacagagttacagtaccctgatcagt

SEQ ID NO: 2658 - DNA, 27 bp, synthetic construct
  misc_feature 1..27: note = Description of Artificial Sequence: Synthetic oligonucleotide
  source 1..27: mol_type = other DNA
caacagagttacagtaccctgatcagt

SEQ ID NO: 2659 - DNA, 27 bp, synthetic construct
  misc_feature 1..27: note = Description of Artificial Sequence: Synthetic oligonucleotide
  source 1..27: mol_type = other DNA
caacagagttacagtaccctgatcagt

SEQ ID NO: 2660 - DNA, 27 bp, synthetic construct
  misc_feature 1..27: note = Description of Artificial Sequence: Synthetic oligonucleotide
  source 1..27: mol_type = other DNA
caacagagttacagtaccctgatcagt

SEQ ID NO: 2661 - DNA, 33 bp, synthetic construct; identical to SEQ ID NO: 2654
  misc_feature 1..33: note = Description of Artificial Sequence: Synthetic oligonucleotide
  source 1..33: mol_type = other DNA

SEQ ID NO: 2662 - DNA, 33 bp, synthetic construct; identical to SEQ ID NO: 2654
  misc_feature 1..33: note = Description of Artificial Sequence: Synthetic oligonucleotide
  source 1..33: mol_type = other DNA

SEQ ID NO: 2663 - DNA, 33 bp, synthetic construct; identical to SEQ ID NO: 2654
  misc_feature 1..33: note = Description of Artificial Sequence: Synthetic oligonucleotide
  source 1..33: mol_type = other DNA

SEQ ID NO: 2664 - DNA, 33 bp, synthetic construct
  misc_feature 1..33: note = Description of Artificial Sequence: Synthetic oligonucleotide
  source 1..33: mol_type = other DNA
ggaacattcgaaagcagcctgagtgctgtggta

SEQ ID NO: 2665 - DNA, 33 bp, synthetic construct; identical to SEQ ID NO: 2654
  misc_feature 1..33: note = Description of Artificial Sequence: Synthetic oligonucleotide
  source 1..33: mol_type = other DNA

SEQ ID NO: 2666 - DNA, 33 bp, synthetic construct; identical to SEQ ID NO: 2654
  misc_feature 1..33: note = Description of Artificial Sequence: Synthetic oligonucleotide
  source 1..33: mol_type = other DNA

SEQ ID NO: 2667 - DNA, 33 bp, synthetic construct; identical to SEQ ID NO: 2654
  misc_feature 1..33: note = Description of Artificial Sequence: Synthetic oligonucleotide
  source 1..33: mol_type = other DNA

SEQ ID NO: 2668 - DNA, 33 bp, synthetic construct; identical to SEQ ID NO: 2664
  misc_feature 1..33: note = Description of Artificial Sequence: Synthetic oligonucleotide
  source 1..33: mol_type = other DNA

SEQ ID NO: 2669 - DNA, 27 bp, synthetic construct
  misc_feature 1..27: note = Description of Artificial Sequence: Synthetic oligonucleotide
  source 1..27: mol_type = other DNA
caacagagttacagtaccctgctcagt

SEQ ID NO: 2670 - DNA, 15 bp, synthetic construct
  misc_feature 1..15: note = Description of Artificial Sequence: Synthetic oligonucleotide
  source 1..15: mol_type = other DNA
ggctactatatgcat

SEQ ID NO: 2671 - DNA, 15 bp, synthetic construct
  misc_feature 1..15: note = Description of Artificial Sequence: Synthetic oligonucleotide
  source 1..15: mol_type = other DNA
aactttggcatgcac

SEQ ID NO: 2672 - DNA, 15 bp, synthetic construct
  misc_feature 1..15: note = Description of Artificial Sequence: Synthetic oligonucleotide
  source 1..15: mol_type = other DNA
tactttggcatgcac

SEQ ID NO: 2673 - DNA, 15 bp, synthetic construct
  misc_feature 1..15: note = Description of Artificial Sequence: Synthetic oligonucleotide
  source 1..15: mol_type = other DNA
agctatggcatgcac

SEQ ID NO: 2674 - DNA, 15 bp, synthetic construct
  misc_feature 1..15: note = Description of Artificial Sequence: Synthetic oligonucleotide
  source 1..15: mol_type = other DNA
ggctactatatccac

SEQ ID NO: 2675 - DNA, 15 bp, synthetic construct
  misc_feature 1..15: note = Description of Artificial Sequence: Synthetic oligonucleotide
  source 1..15: mol_type = other DNA
ggctactatatccac

SEQ ID NO: 2676 - DNA, 15 bp, synthetic construct
  misc_feature 1..15: note = Description of Artificial Sequence: Synthetic oligonucleotide
  source 1..15: mol_type = other DNA
ggctactatatacac

SEQ ID NO: 2677 - DNA, 15 bp, synthetic construct
  misc_feature 1..15: note = Description of Artificial Sequence: Synthetic oligonucleotide
  source 1..15: mol_type = other DNA
ggctactatatacac

SEQ ID NO: 2678 - DNA, 21 bp, synthetic construct
  misc_feature 1..21: note = Description of Artificial Sequence: Synthetic oligonucleotide
  source 1..21: mol_type = other DNA
agtggtggttactactggagc

SEQ ID NO: 2679 - DNA, 15 bp, synthetic construct
  misc_feature 1..15: note = Description of Artificial Sequence: Synthetic oligonucleotide
  source 1..15: mol_type = other DNA
aactatggcatgcac

SEQ ID NO: 2680 - DNA, 15 bp, synthetic construct
  misc_feature 1..15: note = Description of Artificial Sequence: Synthetic oligonucleotide
  source 1..15: mol_type = other DNA
tactttggcatgcac

SEQ ID NO: 2681 - DNA, 15 bp, synthetic construct
  misc_feature 1..15: note = Description of Artificial Sequence: Synthetic oligonucleotide
  source 1..15: mol_type = other DNA
agctatggcatgcac

SEQ ID NO: 2682 - DNA, 15 bp, synthetic construct
  misc_feature 1..15: note = Description of Artificial Sequence: Synthetic oligonucleotide
  source 1..15: mol_type = other DNA
agttactactggagc

SEQ ID NO: 2683 - DNA, 15 bp, synthetic construct
  misc_feature 1..15: note = Description of Artificial Sequence: Synthetic oligonucleotide
  source 1..15: mol_type = other DNA
agttactactggagc

SEQ ID NO: 2684 - DNA, 15 bp, synthetic construct
  misc_feature 1..15: note = Description of Artificial Sequence: Synthetic oligonucleotide
  source 1..15: mol_type = other DNA
tactttggcatgcac

SEQ ID NO: 2685 - DNA, 15 bp, synthetic construct
  misc_feature 1..15: note = Description of Artificial Sequence: Synthetic oligonucleotide
  source 1..15: mol_type = other DNA
tactttggcatgcac

SEQ ID NO: 2686 - DNA, 15 bp, synthetic construct
  misc_feature 1..15: note = Description of Artificial Sequence: Synthetic oligonucleotide
  source 1..15: mol_type = other DNA
tactttggcatgcac

SEQ ID NO: 2687 - DNA, 15 bp, synthetic construct
  misc_feature 1..15: note = Description of Artificial Sequence: Synthetic oligonucleotide
  source 1..15: mol_type = other DNA
tactttggcatgcac

SEQ ID NO: 2688 - DNA, 15 bp, synthetic construct
  misc_feature 1..15: note = Description of Artificial Sequence: Synthetic oligonucleotide
  source 1..15: mol_type = other DNA
tactttggcatgcac

SEQ ID NO: 2689 - DNA, 15 bp, synthetic construct
  misc_feature 1..15: note = Description of Artificial Sequence: Synthetic oligonucleotide
  source 1..15: mol_type = other DNA
tactttggcatgcac

SEQ ID NO: 2690 - DNA, 15 bp, synthetic construct
  misc_feature 1..15: note = Description of Artificial Sequence: Synthetic oligonucleotide
  source 1..15: mol_type = other DNA
aactttggcatgcac

SEQ ID NO: 2691 - DNA, 15 bp, synthetic construct
  misc_feature 1..15: note = Description of Artificial Sequence: Synthetic oligonucleotide
  source 1..15: mol_type = other DNA
aactttggcatgcac

SEQ ID NO: 2692 - DNA, 15 bp, synthetic construct
  misc_feature 1..15: note = Description of Artificial Sequence: Synthetic oligonucleotide
  source 1..15: mol_type = other DNA
aactttggcatgcac

SEQ ID NO: 2693 - DNA, 15 bp, synthetic construct
  misc_feature 1..15: note = Description of Artificial Sequence: Synthetic oligonucleotide
  source 1..15: mol_type = other DNA
aactttggcatgcac

SEQ ID NO: 2694 - DNA, 15 bp, synthetic construct
  misc_feature 1..15: note = Description of Artificial Sequence: Synthetic oligonucleotide
  source 1..15: mol_type = other DNA
aactttggcatgcac

SEQ ID NO: 2695 - DNA, 15 bp, synthetic construct
  misc_feature 1..15: note = Description of Artificial Sequence: Synthetic oligonucleotide
  source 1..15: mol_type = other DNA
aactttggcatgcac

SEQ ID NO: 2696 - DNA, 15 bp, synthetic construct
  misc_feature 1..15: note = Description of Artificial Sequence: Synthetic oligonucleotide
  source 1..15: mol_type = other DNA
aactttggcatgcac

SEQ ID NO: 2697 - DNA, 15 bp, synthetic construct
  misc_feature 1..15: note = Description of Artificial Sequence: Synthetic oligonucleotide
  source 1..15: mol_type = other DNA
aactttggcatgcac

SEQ ID NO: 2698 - DNA, 15 bp, synthetic construct
  misc_feature 1..15: note = Description of Artificial Sequence: Synthetic oligonucleotide
  source 1..15: mol_type = other DNA
aactttggcatgcac

SEQ ID NO: 2699 - DNA, 15 bp, synthetic construct
  misc_feature 1..15: note = Description of Artificial Sequence: Synthetic oligonucleotide
  source 1..15: mol_type = other DNA
aactttggcatgcac

SEQ ID NO: 2700 - DNA, 15 bp, synthetic construct
  misc_feature 1..15: note = Description of Artificial Sequence: Synthetic oligonucleotide
  source 1..15: mol_type = other DNA
aactttggcatgcac

SEQ ID NO: 2701 - DNA, 15 bp, synthetic construct
  misc_feature 1..15: note = Description of Artificial Sequence: Synthetic oligonucleotide
  source 1..15: mol_type = other DNA
aactttggcatgcac

SEQ ID NO: 2702 - DNA, 15 bp, synthetic construct
  misc_feature 1..15: note = Description of Artificial Sequence: Synthetic oligonucleotide
  source 1..15: mol_type = other DNA
aactttggcatgcac

SEQ ID NO: 2703 - DNA, 15 bp, synthetic construct
  misc_feature 1..15: note = Description of Artificial Sequence: Synthetic oligonucleotide
  source 1..15: mol_type = other DNA
aactttggcatgcac

SEQ ID NO: 2704 - DNA, 15 bp, synthetic construct
  misc_feature 1..15: note = Description of Artificial Sequence: Synthetic oligonucleotide
  source 1..15: mol_type = other DNA
aactttggcatgcac

SEQ ID NO: 2705 - DNA, 15 bp, synthetic construct
  misc_feature 1..15: note = Description of Artificial Sequence: Synthetic oligonucleotide
  source 1..15: mol_type = other DNA
aactttggcatgcac

SEQ ID NO: 2706 - DNA, 15 bp, synthetic construct
  misc_feature 1..15: note = Description of Artificial Sequence: Synthetic oligonucleotide
  source 1..15: mol_type = other DNA
aactttggcatgcac

SEQ ID NO: 2707 - DNA, 15 bp, synthetic construct
  misc_feature 1..15: note = Description of Artificial Sequence: Synthetic oligonucleotide
  source 1..15: mol_type = other DNA
aactttggcatgcac

SEQ ID NO: 2708 - DNA, 15 bp, synthetic construct
  misc_feature 1..15: note = Description of Artificial Sequence: Synthetic oligonucleotide
  source 1..15: mol_type = other DNA
aactttggcatgcac

SEQ ID NO: 2709 - DNA, 15 bp, synthetic construct
  misc_feature 1..15: note = Description of Artificial Sequence: Synthetic oligonucleotide
  source 1..15: mol_type = other DNA
agctatggcatgcac

SEQ ID NO: 2710 - DNA, 15 bp, synthetic construct
  misc_feature 1..15: note = Description of Artificial Sequence: Synthetic oligonucleotide
  source 1..15: mol_type = other DNA
agctatggcatgcac

SEQ ID NO: 2711 - DNA, 15 bp, synthetic construct
  misc_feature 1..15: note = Description of Artificial Sequence: Synthetic oligonucleotide
  source 1..15: mol_type = other DNA
agctatggcatgcac

SEQ ID NO: 2712 - DNA, 15 bp, synthetic construct
  misc_feature 1..15: note = Description of Artificial Sequence: Synthetic oligonucleotide
  source 1..15: mol_type = other DNA
agctatggcatgcac

SEQ ID NO: 2713 - DNA, 15 bp, synthetic construct
  misc_feature 1..15: note = Description of Artificial Sequence: Synthetic oligonucleotide
  source 1..15: mol_type = other DNA
agctatggcatgcac

SEQ ID NO: 2714 - DNA, 15 bp, synthetic construct
  misc_feature 1..15: note = Description of Artificial Sequence: Synthetic oligonucleotide
  source 1..15: mol_type = other DNA
agctatggcatgcac

SEQ ID NO: 2715 - DNA, 15 bp, synthetic construct
  misc_feature 1..15: note = Description of Artificial Sequence: Synthetic oligonucleotide
  source 1..15: mol_type = other DNA
agctatggcatgcac

SEQ ID NO: 2716 - DNA, 15 bp, synthetic construct
  misc_feature 1..15: note = Description of Artificial Sequence: Synthetic oligonucleotide
  source 1..15: mol_type = other DNA
agctatggcatgcac

SEQ ID NO: 2717 - DNA, 15 bp, synthetic construct
  misc_feature 1..15: note = Description of Artificial Sequence: Synthetic oligonucleotide
  source 1..15: mol_type = other DNA
agctatggcatgcac

SEQ ID NO: 2718 - DNA, 15 bp, synthetic construct
  misc_feature 1..15: note = Description of Artificial Sequence: Synthetic oligonucleotide
  source 1..15: mol_type = other DNA
tactttggcatgcac

SEQ ID NO: 2719 - DNA, 15 bp, synthetic construct
  misc_feature 1..15: note = Description of Artificial Sequence: Synthetic oligonucleotide
  source 1..15: mol_type = other DNA
tactttggcatgcac

SEQ ID NO: 2720 - DNA, 15 bp, synthetic construct
  misc_feature 1..15: note = Description of Artificial Sequence: Synthetic oligonucleotide
  source 1..15: mol_type = other DNA
tactttggcatgcac

SEQ ID NO: 2721 - DNA, 15 bp, synthetic construct
  misc_feature 1..15: note = Description of Artificial Sequence: Synthetic oligonucleotide
  source 1..15: mol_type = other DNA
tactttggcatgcac

SEQ ID NO: 2722 - DNA, 15 bp, synthetic construct
  misc_feature 1..15: note = Description of Artificial Sequence: Synthetic oligonucleotide
  source 1..15: mol_type = other DNA
tactttggcatgcac

SEQ ID NO: 2723 - DNA, 15 bp, synthetic construct
  misc_feature 1..15: note = Description of Artificial Sequence: Synthetic oligonucleotide
  source 1..15: mol_type = other DNA
tactttggcatgcac

SEQ ID NO: 2724 - DNA, 15 bp, synthetic construct
  misc_feature 1..15: note = Description of Artificial Sequence: Synthetic oligonucleotide
  source 1..15: mol_type = other DNA
tactttggcatgcac

SEQ ID NO: 2725 - DNA, 15 bp, synthetic construct
  misc_feature 1..15: note = Description of Artificial Sequence: Synthetic oligonucleotide
  source 1..15: mol_type = other DNA
agctatggcatgcac

SEQ ID NO: 2726 - DNA, 15 bp, synthetic construct
  misc_feature 1..15: note = Description of Artificial Sequence: Synthetic oligonucleotide
  source 1..15: mol_type = other DNA
agctatggcatgcac

SEQ ID NO: 2727 - DNA, 15 bp, synthetic construct
  misc_feature 1..15: note = Description of Artificial Sequence: Synthetic oligonucleotide
  source 1..15: mol_type = other DNA
agctatggcatgcac

SEQ ID NO: 2728 - DNA, 15 bp, synthetic construct
  misc_feature 1..15: note = Description of Artificial Sequence: Synthetic oligonucleotide
  source 1..15: mol_type = other DNA
agctatggcatgcac

SEQ ID NO: 2729 - DNA, 15 bp, synthetic construct
  misc_feature 1..15: note = Description of Artificial Sequence: Synthetic oligonucleotide
  source 1..15: mol_type = other DNA
agctatggcatgcac

SEQ ID NO: 2730 - DNA, 15 bp, synthetic construct
  misc_feature 1..15: note = Description of Artificial Sequence: Synthetic oligonucleotide
  source 1..15: mol_type = other DNA
agctatggcatgcac

SEQ ID NO: 2731 - DNA, 15 bp, synthetic construct
  misc_feature 1..15: note = Description of Artificial Sequence: Synthetic oligonucleotide
  source 1..15: mol_type = other DNA
agctatggcatgcac

SEQ ID NO: 2732 - DNA, 15 bp, synthetic construct
  misc_feature 1..15: note = Description of Artificial Sequence: Synthetic oligonucleotide
  source 1..15: mol_type = other DNA
agctatggcatgcac

SEQ ID NO: 2733 - DNA, 15 bp, synthetic construct
  misc_feature 1..15: note = Description of Artificial Sequence: Synthetic oligonucleotide
  source 1..15: mol_type = other DNA
agctatggcatgcac

SEQ ID NO: 2734 - DNA, 15 bp, synthetic construct
  misc_feature 1..15: note = Description of Artificial Sequence: Synthetic oligonucleotide
  source 1..15: mol_type = other DNA
agctatggcatgcac

SEQ ID NO: 2735 - DNA, 15 bp, synthetic construct
  misc_feature 1..15: note = Description of Artificial Sequence: Synthetic oligonucleotide
  source 1..15: mol_type = other DNA
agctatggcatgcac

SEQ ID NO: 2736 - DNA, 15 bp, synthetic construct
  misc_feature 1..15: note = Description of Artificial Sequence: Synthetic oligonucleotide
  source 1..15: mol_type = other DNA
agctatggcatgcac

SEQ ID NO: 2737 - DNA, 15 bp, synthetic construct
  misc_feature 1..15: note = Description of Artificial Sequence: Synthetic oligonucleotide
  source 1..15: mol_type = other DNA
agctatggcatgcac

SEQ ID NO: 2738 - DNA, 15 bp, synthetic construct
  misc_feature 1..15: note = Description of Artificial Sequence: Synthetic oligonucleotide
  source 1..15: mol_type = other DNA
agctatggcatgcac

SEQ ID NO: 2739 - DNA, 15 bp, synthetic construct
  misc_feature 1..15: note = Description of Artificial Sequence: Synthetic oligonucleotide
  source 1..15: mol_type = other DNA
agctatggcatgcac

SEQ ID NO: 2740 - DNA, 15 bp, synthetic construct
  misc_feature 1..15: note = Description of Artificial Sequence: Synthetic oligonucleotide
  source 1..15: mol_type = other DNA
aactatggcatgcac

SEQ ID NO: 2741 - DNA, 15 bp, synthetic construct
  misc_feature 1..15: note = Description of Artificial Sequence: Synthetic oligonucleotide
  source 1..15: mol_type = other DNA
aactatggcatgcac

SEQ ID NO: 2742 - DNA, 15 bp, synthetic construct
  misc_feature 1..15: note = Description of Artificial Sequence: Synthetic oligonucleotide
  source 1..15: mol_type = other DNA
aactatggcatgcac

SEQ ID NO: 2743 - DNA, 15 bp, synthetic construct
  misc_feature 1..15: note = Description of Artificial Sequence: Synthetic oligonucleotide
  source 1..15: mol_type = other DNA
aactatggcatgcac

SEQ ID NO: 2744 - DNA, 15 bp, synthetic construct
  misc_feature 1..15: note = Description of Artificial Sequence: Synthetic oligonucleotide
  source 1..15: mol_type = other DNA
aactatggcatgcac

SEQ ID NO: 2745 - DNA, 15 bp, synthetic construct
  misc_feature 1..15: note = Description of Artificial Sequence: Synthetic oligonucleotide
  source 1..15: mol_type = other DNA
aactatggcatgcac

SEQ ID NO: 2746 - DNA, 15 bp, synthetic construct
  misc_feature 1..15: note = Description of Artificial Sequence: Synthetic oligonucleotide
  source 1..15: mol_type = other DNA
aactatggcatgcac

SEQ ID NO: 2747 - DNA, 15 bp, synthetic construct
  misc_feature 1..15: note = Description of Artificial Sequence: Synthetic oligonucleotide
  source 1..15: mol_type = other DNA
aactatggcatgcac

SEQ ID NO: 2748 - DNA, 21 bp, synthetic construct
  misc_feature 1..21: note = Description of Artificial Sequence: Synthetic oligonucleotide
  source 1..21: mol_type = other DNA
agtggtggttactactggagc

SEQ ID NO: 2749 - DNA, 21 bp, synthetic construct
  misc_feature 1..21: note = Description of Artificial Sequence: Synthetic oligonucleotide
  source 1..21: mol_type = other DNA
agtggtggttactactggagc

SEQ ID NO: 2750 - DNA, 21 bp, synthetic construct
  misc_feature 1..21: note = Description of Artificial Sequence: Synthetic oligonucleotide
  source 1..21: mol_type = other DNA
agtggtggttactactggagc

SEQ ID NO: 2751 - DNA, 21 bp, synthetic construct
  misc_feature 1..21: note = Description of Artificial Sequence: Synthetic oligonucleotide
  source 1..21: mol_type = other DNA
agtggtggttactactggagc

SEQ ID NO: 2752 - DNA, 21 bp, synthetic construct
  misc_feature 1..21: note = Description of Artificial Sequence: Synthetic oligonucleotide
  source 1..21: mol_type = other DNA
agtggtggttactactggagc

SEQ ID NO: 2753 - DNA, 21 bp, synthetic construct
  misc_feature 1..21: note = Description of Artificial Sequence: Synthetic oligonucleotide
  source 1..21: mol_type = other DNA
agtggtggttactactggagc

SEQ ID NO: 2754 - DNA, 21 bp, synthetic construct
  misc_feature 1..21: note = Description of Artificial Sequence: Synthetic oligonucleotide
  source 1..21: mol_type = other DNA
agtggtggttactactggagc

SEQ ID NO: 2755 - DNA, 15 bp, synthetic construct
  misc_feature 1..15: note = Description of Artificial Sequence: Synthetic oligonucleotide
  source 1..15: mol_type = other DNA
ggctactatatccac

SEQ ID NO: 2756 - DNA, 15 bp, synthetic construct
  misc_feature 1..15: note = Description of Artificial Sequence: Synthetic oligonucleotide
  source 1..15: mol_type = other DNA
ggctactatatccac

SEQ ID NO: 2757 - DNA, 15 bp, synthetic construct
  misc_feature 1..15: note = Description of Artificial Sequence: Synthetic oligonucleotide
  source 1..15: mol_type = other DNA
ggctactatatccac

SEQ ID NO: 2758 - DNA, 15 bp, synthetic construct
  misc_feature 1..15: note = Description of Artificial Sequence: Synthetic oligonucleotide
  source 1..15: mol_type = other DNA
ggctactatatccac

SEQ ID NO: 2759 - DNA, 15 bp, synthetic construct
  misc_feature 1..15: note = Description of Artificial Sequence: Synthetic oligonucleotide
  source 1..15: mol_type = other DNA
ggctactatatccac

SEQ ID NO: 2760 - DNA, 15 bp, synthetic construct
  misc_feature 1..15: note = Description of Artificial Sequence: Synthetic oligonucleotide
  source 1..15: mol_type = other DNA
ggctactatatccac

SEQ ID NO: 2761 - DNA, 15 bp, synthetic construct
  misc_feature 1..15: note = Description of Artificial Sequence: Synthetic oligonucleotide
  source 1..15: mol_type = other DNA
ggctactatatccac

SEQ ID NO: 2762 - DNA, 15 bp, synthetic construct
  misc_feature 1..15: note = Description of Artificial Sequence: Synthetic oligonucleotide
  source 1..15: mol_type = other DNA
ggctactatatccac

SEQ ID NO: 2763 - DNA, 15 bp, synthetic construct
  misc_feature 1..15: note = Description of Artificial Sequence: Synthetic oligonucleotide
  source 1..15: mol_type = other DNA
ggctactatatccac

SEQ ID NO: 2764 - DNA, 15 bp, synthetic construct
  misc_feature 1..15: note = Description of Artificial Sequence: Synthetic oligonucleotide
  source 1..15: mol_type = other DNA
ggctactatatccac

SEQ ID NO: 2765 - DNA, 15 bp, synthetic construct
  misc_feature 1..15: note = Description of Artificial Sequence: Synthetic oligonucleotide
  source 1..15: mol_type = other DNA
ggctactatatccac

SEQ ID NO: 2766 - DNA, 15 bp, synthetic construct
  misc_feature 1..15: note = Description of Artificial Sequence: Synthetic oligonucleotide
  source 1..15: mol_type = other DNA
ggctactatatacac

SEQ ID NO: 2767 - DNA, 15 bp, synthetic construct
  misc_feature 1..15: note = Description of Artificial Sequence: Synthetic oligonucleotide
  source 1..15: mol_type = other DNA
ggctactatatacac

SEQ ID NO: 2768 - DNA, 15 bp, synthetic construct
  misc_feature 1..15: note = Description of Artificial Sequence: Synthetic oligonucleotide
  source 1..15: mol_type = other DNA
ggctactatatacac

SEQ ID NO: 2769 - DNA, 15 bp, synthetic construct
  misc_feature 1..15: note = Description of Artificial Sequence: Synthetic oligonucleotide
  source 1..15: mol_type = other DNA
ggctactatatacac

SEQ ID NO: 2770 - DNA, 15 bp, synthetic construct
  misc_feature 1..15: note = Description of Artificial Sequence: Synthetic oligonucleotide
  source 1..15: mol_type = other DNA
ggctactatatacac

SEQ ID NO: 2771 - DNA, 15 bp, synthetic construct
  misc_feature 1..15: note = Description of Artificial Sequence: Synthetic oligonucleotide
  source 1..15: mol_type = other DNA
ggctactatatacac

SEQ ID NO: 2772 - DNA, 15 bp, synthetic construct
  misc_feature 1..15: note = Description of Artificial Sequence: Synthetic oligonucleotide
  source 1..15: mol_type = other DNA
ggctactatatacac

SEQ ID NO: 2773 - DNA, 15 bp, synthetic construct
  misc_feature 1..15: note = Description of Artificial Sequence: Synthetic oligonucleotide
  source 1..15: mol_type = other DNA
ggctactatatacac

SEQ ID NO: 2774 - DNA, 15 bp, synthetic construct
  misc_feature 1..15: note = Description of Artificial Sequence: Synthetic oligonucleotide
  source 1..15: mol_type = other DNA
ggctactatatacac

SEQ ID NO: 2775 - DNA, 15 bp, synthetic construct
  misc_feature 1..15: note = Description of Artificial Sequence: Synthetic oligonucleotide
  source 1..15: mol_type = other DNA
ggctactatatccac

SEQ ID NO: 2776 - DNA, 15 bp, synthetic construct
  misc_feature 1..15: note = Description of Artificial Sequence: Synthetic oligonucleotide
  source 1..15: mol_type = other DNA
ggctactatatccac

SEQ ID NO: 2777 - DNA, 15 bp, synthetic construct
  misc_feature 1..15: note = Description of Artificial Sequence: Synthetic oligonucleotide
  source 1..15: mol_type = other DNA
ggctactatatccac

SEQ ID NO: 2778 - DNA, 15 bp, synthetic construct
  misc_feature 1..15: note = Description of Artificial Sequence: Synthetic oligonucleotide
  source 1..15: mol_type = other DNA
ggctactatatccac

SEQ ID NO: 2779 - DNA, 15 bp, synthetic construct
  misc_feature 1..15: note = Description of Artificial Sequence: Synthetic oligonucleotide
  source 1..15: mol_type = other DNA
ggctactatatccac

SEQ ID NO: 2780 - DNA, 15 bp, synthetic construct
  misc_feature 1..15: note = Description of Artificial Sequence: Synthetic oligonucleotide
  source 1..15: mol_type = other DNA
ggctactatatacac

SEQ ID NO: 2781 - DNA, 15 bp, synthetic construct
  misc_feature 1..15: note = Description of Artificial Sequence: Synthetic oligonucleotide
  source 1..15: mol_type = other DNA
ggctactatatacac

SEQ ID NO: 2782 - DNA, 15 bp, synthetic construct
  misc_feature 1..15: note = Description of Artificial Sequence: Synthetic oligonucleotide
  source 1..15: mol_type = other DNA
ggctactatatacac

SEQ ID NO: 2783 - DNA, 15 bp, synthetic construct
  misc_feature 1..15: note = Description of Artificial Sequence: Synthetic oligonucleotide
  source 1..15: mol_type = other DNA
ggctactatatacac

SEQ ID NO: 2784 - DNA, 15 bp, synthetic construct
  misc_feature 1..15: note = Description of Artificial Sequence: Synthetic oligonucleotide
  source 1..15: mol_type = other DNA
ggctactatatacac

SEQ ID NO: 2785 - DNA, 15 bp, synthetic construct
  misc_feature 1..15: note = Description of Artificial Sequence: Synthetic oligonucleotide
  source 1..15: mol_type = other DNA
ggctactatatacac

SEQ ID NO: 2786 - DNA, 15 bp, synthetic construct
  misc_feature 1..15: note = Description of Artificial Sequence: Synthetic oligonucleotide
  source 1..15: mol_type = other DNA
ggctactatatacac

SEQ ID NO: 2787 - DNA, 15 bp, synthetic construct
  misc_feature 1..15: note = Description of Artificial Sequence: Synthetic oligonucleotide
  source 1..15: mol_type = other DNA
ggctactatatacac

SEQ ID NO: 2788 - DNA, 15 bp, synthetic construct
  misc_feature 1..15: note = Description of Artificial Sequence: Synthetic oligonucleotide
  source 1..15: mol_type = other DNA
ggctactatatacac

SEQ ID NO: 2789 - DNA, 15 bp, synthetic construct
  misc_feature 1..15: note = Description of Artificial Sequence: Synthetic oligonucleotide
  source 1..15: mol_type = other DNA
ggctactatatacac

SEQ ID NO: 2790 - DNA, 15 bp, synthetic construct
  misc_feature 1..15: note = Description of Artificial Sequence: Synthetic oligonucleotide
  source 1..15: mol_type = other DNA
ggctactatatacac

SEQ ID NO: 2791 - DNA, 15 bp, synthetic construct
  misc_feature 1..15: note = Description of Artificial Sequence: Synthetic oligonucleotide
  source 1..15: mol_type = other DNA
ggctactatatacac

SEQ ID NO: 2792 - DNA, 15 bp, synthetic construct
  misc_feature 1..15: note = Description of Artificial Sequence: Synthetic oligonucleotide
  source 1..15: mol_type = other DNA
ggctactatatacac

SEQ ID NO: 2793 - DNA, 15 bp, synthetic construct
  misc_feature 1..15: note = Description of Artificial Sequence: Synthetic oligonucleotide
  source 1..15: mol_type = other DNA
ggctactatatgcat

SEQ ID NO: 2794 - DNA, 15 bp, synthetic construct
  misc_feature 1..15: note = Description of Artificial Sequence: Synthetic oligonucleotide
  source 1..15: mol_type = other DNA
ggctactatatgcat

SEQ ID NO: 2795 - DNA, 15 bp, synthetic construct
  misc_feature 1..15: note = Description of Artificial Sequence: Synthetic oligonucleotide
  source 1..15: mol_type = other DNA
ggctactatatgcat

SEQ ID NO: 2796 - DNA, 15 bp, synthetic construct
  misc_feature 1..15: note = Description of Artificial Sequence: Synthetic oligonucleotide
  source 1..15: mol_type = other DNA
ggctactatatgcat

SEQ ID NO: 2797 - DNA, 15 bp, synthetic construct
  misc_feature 1..15: note = Description of Artificial Sequence: Synthetic oligonucleotide
  source 1..15: mol_type = other DNA
ggctactatatgcat

SEQ ID NO: 2798 - DNA, 15 bp, synthetic construct
  misc_feature 1..15: note = Description of Artificial Sequence: Synthetic oligonucleotide
  source 1..15: mol_type = other DNA
ggctactatatgcat

SEQ ID NO: 2799 - DNA, 15 bp, synthetic construct
  misc_feature 1..15: note = Description of Artificial Sequence: Synthetic oligonucleotide
  source 1..15: mol_type = other DNA
ggctactatatgcat

SEQ ID NO: 2800 - DNA, 15 bp, synthetic construct
  misc_feature 1..15: note = Description of Artificial Sequence: Synthetic oligonucleotide
  source 1..15: mol_type = other DNA
ggctactatatgcat

SEQ ID NO: 2801 - DNA, 15 bp, synthetic construct
  misc_feature 1..15: note = Description of Artificial Sequence: Synthetic oligonucleotide
  source 1..15: mol_type = other DNA
ggctactatatgcat

SEQ ID NO: 2802 - DNA, 15 bp, synthetic construct
  misc_feature 1..15: note = Description of Artificial Sequence: Synthetic oligonucleotide
  source 1..15: mol_type = other DNA
ggctactatatgcat

SEQ ID NO: 2803 - DNA, 15 bp, synthetic construct
  misc_feature 1..15: note = Description of Artificial Sequence: Synthetic oligonucleotide
  source 1..15: mol_type = other DNA
ggctactatatgcat

SEQ ID NO: 2804 - DNA, 15 bp, synthetic construct
  misc_feature 1..15: note = Description of Artificial Sequence: Synthetic oligonucleotide
  source 1..15: mol_type = other DNA
ggctactatatgcat

SEQ ID NO: 2805 - DNA, 15 bp, synthetic construct
  misc_feature 1..15: note = Description of Artificial Sequence: Synthetic oligonucleotide
  source 1..15: mol_type = other DNA
ggctactatatgcat

SEQ ID NO: 2806 - DNA, 15 bp, synthetic construct
  misc_feature 1..15: note = Description of Artificial Sequence: Synthetic oligonucleotide
  source 1..15: mol_type = other DNA
ggctactatatgcat

SEQ ID NO: 2807 - DNA, 15 bp, synthetic construct
  misc_feature 1..15: note = Description of Artificial Sequence: Synthetic oligonucleotide
  source 1..15: mol_type = other DNA
aactttggcatgcac

SEQ ID NO: 2808 - DNA, 15 bp, synthetic construct
  misc_feature 1..15: note = Description of Artificial Sequence: Synthetic oligonucleotide
  source 1..15: mol_type = other DNA
tactttggcatgcac

SEQ ID NO: 2809 - DNA, 15 bp, synthetic construct
  misc_feature 1..15: note = Description of Artificial Sequence: Synthetic oligonucleotide
  source 1..15: mol_type = other DNA
ggctactatatgcat

SEQ ID NO: 2810 - DNA, 15 bp, synthetic construct
  misc_feature 1..15: note = Description of Artificial Sequence: Synthetic oligonucleotide
  source 1..15: mol_type = other DNA
agctatggcatacac

SEQ ID NO: 2811 - DNA, 15 bp, synthetic construct
  misc_feature 1..15: note = Description of Artificial Sequence: Synthetic oligonucleotide
  source 1..15: mol_type = other DNA
agttatgatatcaac

SEQ ID NO: 2812 - DNA, 15 bp, synthetic construct
  misc_feature 1..15: note = Description of Artificial Sequence: Synthetic oligonucleotide
  source 1..15: mol_type = other DNA
agctatggcatacac

SEQ ID NO: 2813 - DNA, 15 bp, synthetic construct
  misc_feature 1..15: note = Description of Artificial Sequence: Synthetic oligonucleotide
  source 1..15: mol_type = other DNA
agctatggcatacac

SEQ ID NO: 2814 - DNA, 15 bp, synthetic construct
  misc_feature 1..15: note = Description of Artificial Sequence: Synthetic oligonucleotide
  source 1..15: mol_type = other DNA
agctatggcatacac

SEQ ID NO: 2815 - DNA, 15 bp, synthetic construct
  misc_feature 1..15: note = Description of Artificial Sequence: Synthetic oligonucleotide
  source 1..15: mol_type = other DNA
agctatggcatacac

SEQ ID NO: 2816 - DNA, 15 bp, synthetic construct
  misc_feature 1..15: note = Description of Artificial Sequence: Synthetic oligonucleotide
  source 1..15: mol_type = other DNA
agctatggcatacac

SEQ ID NO: 2817 - DNA, 15 bp, synthetic construct
  misc_feature 1..15: note = Description of Artificial Sequence: Synthetic oligonucleotide
  source 1..15: mol_type = other DNA
agctatggcatacac

SEQ ID NO: 2818 - DNA, 15 bp, synthetic construct
  misc_feature 1..15: note = Description of Artificial Sequence: Synthetic oligonucleotide
  source 1..15: mol_type = other DNA
agttatgatatcaac

SEQ ID NO: 2819 - DNA, 15 bp, synthetic construct
  misc_feature 1..15: note = Description of Artificial Sequence: Synthetic oligonucleotide
  source 1..15: mol_type = other DNA
agttatgatatcaac

SEQ ID NO: 2820 - DNA, 15 bp, synthetic construct
  misc_feature 1..15: note = Description of Artificial Sequence: Synthetic oligonucleotide
  source 1..15: mol_type = other DNA
agttatgatatcaac

SEQ ID NO: 2821 - DNA, 15 bp, synthetic construct
  misc_feature 1..15: note = Description of Artificial Sequence: Synthetic oligonucleotide
  source 1..15: mol_type = other DNA
agttatgatatcaac

SEQ ID NO: 2822 - DNA, 15 bp, synthetic construct
  misc_feature 1..15: note = Description of Artificial Sequence: Synthetic oligonucleotide
  source 1..15: mol_type = other DNA
agttatgatatcaac

SEQ ID NO: 2823 - DNA, 15 bp, synthetic construct
  misc_feature 1..15: note = Description of Artificial Sequence: Synthetic oligonucleotide
  source 1..15: mol_type = other DNA
agttatgatatcaac

SEQ ID NO: 2824 - DNA, 15 bp, synthetic construct
  misc_feature 1..15: note = Description of Artificial Sequence: Synthetic oligonucleotide
  source 1..15: mol_type = other DNA
agttatgatatcaac

SEQ ID NO: 2825 - DNA, 15 bp, synthetic construct
  misc_feature 1..15: note = Description of Artificial Sequence: Synthetic oligonucleotide
  source 1..15: mol_type = other DNA
agttatgatatcaac

SEQ ID NO: 2826 - DNA, 15 bp, synthetic construct
  misc_feature 1..15: note = Description of Artificial Sequence: Synthetic oligonucleotide
  source 1..15: mol_type = other DNA
agctatggcatacac

SEQ ID NO: 2827 - DNA, 51 bp, synthetic construct
  misc_feature 1..51: note = Description of Artificial Sequence: Synthetic oligonucleotide
  source 1..51: mol_type = other DNA
tggatcaaccctaacagtggtggcacaaactatgcacagaagtttcagggc

SEQ ID NO: 2828 - DNA, 51 bp, synthetic construct
  misc_feature 1..51: note = Description of Artificial Sequence: Synthetic oligonucleotide
  source 1..51: mol_type = other DNA
gttatatggtatgatggaagtaatgaaaactatgcagactccgtgaagggc

SEQ ID NO: 2829 - DNA, 51 bp, synthetic construct
  misc_feature 1..51: note = Description of Artificial Sequence: Synthetic oligonucleotide
  source 1..51: mol_type = other DNA
gttatatggtatgatggaagtaataaatactatgcagactccgtgaagggc

SEQ ID NO: 2830 - DNA, 51 bp, synthetic construct; identical to SEQ ID NO: 2829
  misc_feature 1..51: note = Description of Artificial Sequence: Synthetic oligonucleotide
  source 1..51: mol_type = other DNA

SEQ ID NO: 2831 - DNA, 51 bp, synthetic construct
  misc_feature 1..51: note = Description of Artificial Sequence: Synthetic oligonucleotide
  source 1..51: mol_type = other DNA
tggatcaaccctgacagtggtggcacagactattcacagaggtttcagggc

SEQ ID NO: 2832 - DNA, 51 bp, synthetic construct; identical to SEQ ID NO: 2831
  misc_feature 1..51: note = Description of Artificial Sequence: Synthetic oligonucleotide
  source 1..51: mol_type = other DNA

SEQ ID NO: 2833 - DNA, 51 bp, synthetic construct
  misc_feature 1..51: note = Description of Artificial Sequence: Synthetic oligonucleotide
  source 1..51: mol_type = other DNA
tggatcagccctaacagtggtgacacaagctatgcacagaagtttcaggac

SEQ ID NO: 2834 - DNA, 51 bp, synthetic construct
  misc_feature 1..51: note = Description of Artificial Sequence: Synthetic oligonucleotide
  source 1..51: mol_type = other DNA
tggataagccctaacaatggtgacacaaactatgcacagaagtttcaggac

SEQ ID NO: 2835 - DNA, 48 bp, synthetic construct
  misc_feature 1..48: note = Description of Artificial Sequence: Synthetic oligonucleotide
  source 1..48: mol_type = other DNA
tacatctattacagtgggagcacctactacaacccgtccctcaagagt

SEQ ID NO: 2836 - DNA, 51 bp, synthetic construct
  misc_feature 1..51: note = Description of Artificial Sequence: Synthetic oligonucleotide
  source 1..51: mol_type = other DNA
gctatatggtttgatggaagtgataaatactatgcagactccgtgaagggc

SEQ ID NO: 2837 - DNA, 51 bp, synthetic construct; identical to SEQ ID NO: 2829
  misc_feature 1..51: note = Description of Artificial Sequence: Synthetic oligonucleotide
  source 1..51: mol_type = other DNA

SEQ ID NO: 2838 - DNA, 51 bp, synthetic construct
  misc_feature 1..51: note = Description of Artificial Sequence: Synthetic oligonucleotide
  source 1..51: mol_type = other DNA
gctatatggtatgatggaaataataaatactatgcagactccgtgaagggc

SEQ ID NO: 2839 - DNA, 48 bp, synthetic construct
  misc_feature 1..48: note = Description of Artificial Sequence: Synthetic oligonucleotide
  source 1..48: mol_type = other DNA
cgtatctataccagtgggagcaccaactacaacccctccctcaagagt

SEQ ID NO: 2840 - DNA, 48 bp, synthetic construct; identical to SEQ ID NO: 2839
  misc_feature 1..48: note = Description of Artificial Sequence: Synthetic oligonucleotide
  source 1..48: mol_type = other DNA

SEQ ID NO: 2841 - DNA, 51 bp, synthetic construct
  misc_feature 1..51: note = Description of Artificial Sequence: Synthetic oligonucleotide
  source 1..51: mol_type = other DNA
gttatatggtatgatgcaagtaataaatactatgcagacgccgtgaagggc

SEQ ID NO: 2842 - DNA, 51 bp, synthetic construct
  misc_feature 1..51: note = Description of Artificial Sequence: Synthetic oligonucleotide
  source 1..51: mol_type = other DNA
gttatatggtatgatgcaagtaataaatactatgcagactccgtgaagggc

SEQ ID NO: 2843 - DNA, 51 bp, synthetic construct
  misc_feature 1..51: note = Description of Artificial Sequence: Synthetic oligonucleotide
  source 1..51: mol_type = other DNA
gttatatggtatgatggaagtaataaatactatgcagacgccgtgaagggc

SEQ ID NO: 2844 - DNA, 51 bp, synthetic construct; identical to SEQ ID NO: 2841
  misc_feature 1..51: note = Description of Artificial Sequence: Synthetic oligonucleotide
  source 1..51: mol_type = other DNA

SEQ ID NO: 2845 - DNA, 51 bp, synthetic construct; identical to SEQ ID NO: 2841
  misc_feature 1..51: note = Description of Artificial Sequence: Synthetic oligonucleotide
  source 1..51: mol_type = other DNA

SEQ ID NO: 2846 - DNA, 51 bp, synthetic construct; identical to SEQ ID NO: 2841
  misc_feature 1..51: note = Description of Artificial Sequence: Synthetic oligonucleotide
  source 1..51: mol_type = other DNA

SEQ ID NO: 2847 - DNA, 51 bp, synthetic construct
  misc_feature 1..51: note = Description of Artificial Sequence: Synthetic oligonucleotide
  source 1..51: mol_type = other DNA
gttatatggtatgatgcaagtaatgaaaactatgcagacgccgtgaagggc

SEQ ID NO: 2848 - DNA, 51 bp, synthetic construct; identical to SEQ ID NO: 2847
  misc_feature 1..51: note = Description of Artificial Sequence: Synthetic oligonucleotide
  source 1..51: mol_type = other DNA

SEQ ID NO: 2849 - DNA, 51 bp, synthetic construct; identical to SEQ ID NO: 2847
  misc_feature 1..51: note = Description of Artificial Sequence: Synthetic oligonucleotide
  source 1..51: mol_type = other DNA

SEQ ID NO: 2850 - DNA, 51 bp, synthetic construct
  misc_feature 1..51: note = Description of Artificial Sequence: Synthetic oligonucleotide
  source 1..51: mol_type = other DNA
gttatatggtatgatgcaagtaatgaaaactatgcagactccgtgaagggc

SEQ ID NO: 2851 - DNA, 51 bp, synthetic construct
  misc_feature 1..51: note = Description of Artificial Sequence: Synthetic oligonucleotide
  source 1..51: mol_type = other DNA
gttatatggtatgatggaagtaatgaaaactatgcagacgccgtgaagggc

SEQ ID NO: 2852 - DNA, 51 bp, synthetic construct; identical to SEQ ID NO: 2847
  misc_feature 1..51: note = Description of Artificial Sequence: Synthetic oligonucleotide
  source 1..51: mol_type = other DNA

SEQ ID NO: 2853 - DNA, 51 bp, synthetic construct; identical to SEQ ID NO: 2847
  misc_feature 1..51: note = Description of Artificial Sequence: Synthetic oligonucleotide
  source 1..51: mol_type = other DNA

SEQ ID NO: 2854 - DNA, 51 bp, synthetic construct; identical to SEQ ID NO: 2828
  misc_feature 1..51: note = Description of Artificial Sequence: Synthetic oligonucleotide
  source 1..51: mol_type = other DNA

SEQ ID NO: 2855 - DNA, 51 bp, synthetic construct; identical to SEQ ID NO: 2847
  misc_feature 1..51: note = Description of Artificial Sequence: Synthetic oligonucleotide
  source 1..51: mol_type = other DNA

SEQ ID NO: 2856 - DNA, 51 bp, synthetic construct; identical to SEQ ID NO: 2847
  misc_feature 1..51: note = Description of Artificial Sequence: Synthetic oligonucleotide
  source 1..51: mol_type = other DNA

SEQ ID NO: 2857 - DNA, 51 bp, synthetic construct; identical to SEQ ID NO: 2847
  misc_feature 1..51: note = Description of Artificial Sequence: Synthetic oligonucleotide
  source 1..51: mol_type = other DNA

SEQ ID NO: 2858 - DNA, 51 bp, synthetic construct; identical to SEQ ID NO: 2847
  misc_feature 1..51: note = Description of Artificial Sequence: Synthetic oligonucleotide
  source 1..51: mol_type = other DNA

SEQ ID NO: 2859 - DNA, 51 bp, synthetic construct; identical to SEQ ID NO: 2847
  misc_feature 1..51: note = Description of Artificial Sequence: Synthetic oligonucleotide
  source 1..51: mol_type = other DNA

SEQ ID NO: 2860 - DNA, 51 bp, synthetic construct; identical to SEQ ID NO: 2847
  misc_feature 1..51: note = Description of Artificial Sequence: Synthetic oligonucleotide
  source 1..51: mol_type = other DNA

SEQ ID NO: 2861 - DNA, 51 bp, synthetic construct; identical to SEQ ID NO: 2847
  misc_feature 1..51: note = Description of Artificial Sequence: Synthetic oligonucleotide
  source 1..51: mol_type = other DNA

SEQ ID NO: 2862 - DNA, 51 bp, synthetic construct; identical to SEQ ID NO: 2851
  misc_feature 1..51: note = Description of Artificial Sequence: Synthetic oligonucleotide
  source 1..51: mol_type = other DNA

SEQ ID NO: 2863 - DNA, 51 bp, synthetic construct; identical to SEQ ID NO: 2850
  misc_feature 1..51: note = Description of Artificial Sequence: Synthetic oligonucleotide
  source 1..51: mol_type = other DNA

SEQ ID NO: 2864 - DNA, 51 bp, synthetic construct; identical to SEQ ID NO: 2847
  misc_feature 1..51: note = Description of Artificial Sequence: Synthetic oligonucleotide
  source 1..51: mol_type = other DNA

SEQ ID NO: 2865 - DNA, 51 bp, synthetic construct; identical to SEQ ID NO: 2847
  misc_feature 1..51: note = Description of Artificial Sequence: Synthetic oligonucleotide
  source 1..51: mol_type = other DNA

SEQ ID NO: 2866 - DNA, 51 bp, synthetic construct; identical to SEQ ID NO: 2841
  misc_feature 1..51: note = Description of Artificial Sequence: Synthetic oligonucleotide
  source 1..51: mol_type = other DNA

SEQ ID NO: 2867 - DNA, 51 bp, synthetic construct; identical to SEQ ID NO: 2841
  misc_feature 1..51: note = Description of Artificial Sequence: Synthetic oligonucleotide
  source 1..51: mol_type = other DNA

SEQ ID NO: 2868 - DNA, 51 bp, synthetic construct; identical to SEQ ID NO: 2841
  misc_feature 1..51: note = Description of Artificial Sequence: Synthetic oligonucleotide
  source 1..51: mol_type = other DNA

SEQ ID NO: 2869 - DNA, 51 bp, synthetic construct; identical to SEQ ID NO: 2841
  misc_feature 1..51: note = Description of Artificial Sequence: Synthetic oligonucleotide
  source 1..51: mol_type = other DNA

SEQ ID NO: 2870 - DNA, 51 bp, synthetic construct; identical to SEQ ID NO: 2841
  misc_feature 1..51: note = Description of Artificial Sequence: Synthetic oligonucleotide
  source 1..51: mol_type = other DNA

SEQ ID NO: 2871 - DNA, 51 bp, synthetic construct; identical to SEQ ID NO: 2841
  misc_feature 1..51: note = Description of Artificial Sequence: Synthetic oligonucleotide
  source 1..51: mol_type = other DNA

SEQ ID NO: 2872 - DNA, 51 bp, synthetic construct; identical to SEQ ID NO: 2841
  misc_feature 1..51: note = Description of Artificial Sequence: Synthetic oligonucleotide
  source 1..51: mol_type = other DNA

SEQ ID NO: 2873 - DNA, 51 bp, synthetic construct; identical to SEQ ID NO: 2842
  misc_feature 1..51: note = Description of Artificial Sequence: Synthetic oligonucleotide
  source 1..51: mol_type = other DNA

SEQ ID NO: 2874 - DNA, 51 bp, synthetic construct; identical to SEQ ID NO: 2843
  misc_feature 1..51: note = Description of Artificial Sequence: Synthetic oligonucleotide
  source 1..51: mol_type = other DNA

SEQ ID NO: 2875 - DNA, 51 bp, synthetic construct; identical to SEQ ID NO: 2841
  misc_feature 1..51: note = Description of Artificial Sequence: Synthetic oligonucleotide
  source 1..51: mol_type = other DNA

SEQ ID NO: 2876 - DNA, 51 bp, synthetic construct; identical to SEQ ID NO: 2841
  misc_feature 1..51: note = Description of Artificial Sequence: Synthetic oligonucleotide
  source 1..51: mol_type = other DNA

SEQ ID NO: 2877 - DNA, 51 bp, synthetic construct; identical to SEQ ID NO: 2841
  misc_feature 1..51: note = Description of Artificial Sequence: Synthetic oligonucleotide
  source 1..51: mol_type = other DNA

SEQ ID NO: 2878 - DNA, 51 bp, synthetic construct; identical to SEQ ID NO: 2841
  misc_feature 1..51: note = Description of Artificial Sequence: Synthetic oligonucleotide
  source 1..51: mol_type = other DNA

SEQ ID NO: 2879 - DNA, 51 bp, synthetic construct; identical to SEQ ID NO: 2829
  misc_feature 1..51: note = Description of Artificial Sequence: Synthetic oligonucleotide
  source 1..51: mol_type = other DNA

SEQ ID NO: 2880 - DNA, 51 bp, synthetic construct; identical to SEQ ID NO: 2842
  misc_feature 1..51: note = Description of Artificial Sequence: Synthetic oligonucleotide
  source 1..51: mol_type = other DNA

SEQ ID NO: 2881 - DNA, 51 bp, synthetic construct; identical to SEQ ID NO: 2843
  misc_feature 1..51: note = Description of Artificial Sequence: Synthetic oligonucleotide
  source 1..51: mol_type = other DNA

SEQ ID NO: 2882 - DNA, 51 bp, synthetic construct
  misc_feature 1..51: note = Description of Artificial Sequence: Synthetic oligonucleotide
  source 1..51: mol_type = other DNA
gctatatggtatgatgcaaataataaatactatgcagacgccgtgaagggc

SEQ ID NO: 2883 - DNA, 51 bp, synthetic construct; identical to SEQ ID NO: 2882
  misc_feature 1..51: note = Description of Artificial Sequence: Synthetic oligonucleotide
  source 1..51: mol_type = other DNA

SEQ ID NO: 2884 - DNA, 51 bp, synthetic construct; identical to SEQ ID NO: 2882
  misc_feature 1..51: note = Description of Artificial Sequence: Synthetic oligonucleotide
  source 1..51: mol_type = other DNA

SEQ ID NO: 2885 - DNA, 51 bp, synthetic construct; identical to SEQ ID NO: 2882
  misc_feature 1..51: note = Description of Artificial Sequence: Synthetic oligonucleotide
  source 1..51: mol_type = other DNA

SEQ ID NO: 2886 - DNA, 51 bp, synthetic construct; identical to SEQ ID NO: 2882
  misc_feature 1..51: note = Description of Artificial Sequence: Synthetic oligonucleotide
  source 1..51: mol_type = other DNA

SEQ ID NO: 2887 - DNA, 51 bp, synthetic construct; identical to SEQ ID NO: 2882
  misc_feature 1..51: note = Description of Artificial Sequence: Synthetic oligonucleotide
  source 1..51: mol_type = other DNA

SEQ ID NO: 2888 - DNA, 51 bp, synthetic construct; identical to SEQ ID NO: 2882
  misc_feature 1..51: note = Description of Artificial Sequence: Synthetic oligonucleotide
  source 1..51: mol_type = other DNA

SEQ ID NO: 2889 - DNA, 51 bp, synthetic construct
  misc_feature 1..51: note = Description of Artificial Sequence: Synthetic oligonucleotide
  source 1..51: mol_type = other DNA
gctatatggtatgatggaaataataaatactatgcagacgccgtgaagggc

SEQ ID NO: 2890 - DNA, 51 bp, synthetic construct
  misc_feature 1..51: note = Description of Artificial Sequence: Synthetic oligonucleotide
  source 1..51: mol_type = other DNA
gctatatggtatgatgcaaataataaatactatgcagactccgtgaagggc

SEQ ID NO: 2891 - DNA, 51 bp, synthetic construct; identical to SEQ ID NO: 2882
  misc_feature 1..51: note = Description of Artificial Sequence: Synthetic oligonucleotide
  source 1..51: mol_type = other DNA

SEQ ID NO: 2892 - DNA, 51 bp, synthetic construct; identical to SEQ ID NO: 2882
  misc_feature 1..51: note = Description of Artificial Sequence: Synthetic oligonucleotide
  source 1..51: mol_type = other DNA

SEQ ID NO: 2893 - DNA, 51 bp, synthetic construct
  misc_feature 1..51: note = Description of Artificial Sequence: Synthetic oligonucleotide
  source 1..51: mol_type = other DNA
gttatatggtatgatgcaagtaataaatactatgaagacgccgtgaagggc

SEQ ID NO: 2894 - DNA, 51 bp, synthetic construct
  misc_feature 1..51: note = Description of Artificial Sequence: Synthetic oligonucleotide
  source 1..51: mol_type = other DNA
gttatatggtatgatggaagtaataaatactatgaagactccgtgaagggc

SEQ ID NO: 2895 - DNA, 51 bp, synthetic construct
  misc_feature 1..51: note = Description of Artificial Sequence: Synthetic oligonucleotide
  source 1..51: mol_type = other DNA
gttatatggtatgatggaagtaataaatactatgaagacgccgtgaagggc

SEQ ID NO: 2896 - DNA, 51 bp, synthetic construct
  misc_feature 1..51: note = Description of Artificial Sequence: Synthetic oligonucleotide
  source 1..51: mol_type = other DNA
gttatatggtatgatgcaagtaataaatactatgaagactccgtgaagggc

SEQ ID NO: 2897 - DNA, 51 bp, synthetic construct
  misc_feature 1..51: note = Description of Artificial Sequence: Synthetic oligonucleotide
  source 1..51: mol_type = other DNA
gctatatggtttgatgcaagtgataaatactatgcagacgccgtgaagggc

SEQ ID NO: 2898 - DNA, 51 bp, synthetic construct
  misc_feature 1..51: note = Description of Artificial Sequence: Synthetic oligonucleotide
  source 1..51: mol_type = other DNA
gctatatggtttgatgcaagtgataaatactatgcagactccgtgaagggc

SEQ ID NO: 2899 - DNA, 51 bp, synthetic construct
  misc_feature 1..51: note = Description of Artificial Sequence: Synthetic oligonucleotide
  source 1..51: mol_type = other DNA
gctatatggtttgatggaagtgataaatactatgcagacgccgtgaagggc

SEQ ID NO: 2900 - DNA, 51 bp, synthetic construct; identical to SEQ ID NO: 2897
  misc_feature 1..51: note = Description of Artificial Sequence: Synthetic oligonucleotide
  source 1..51: mol_type = other DNA

SEQ ID NO: 2901 - DNA, 51 bp, synthetic construct; identical to SEQ ID NO: 2897
  misc_feature 1..51: note = Description of Artificial Sequence: Synthetic oligonucleotide
  source 1..51: mol_type = other DNA

SEQ ID NO: 2902 - DNA, 51 bp, synthetic construct; identical to SEQ ID NO: 2897
  misc_feature 1..51: note = Description of Artificial Sequence: Synthetic oligonucleotide
  source 1..51: mol_type = other DNA

SEQ ID NO: 2903 - DNA, 51 bp, synthetic construct; identical to SEQ ID NO: 2897
  misc_feature 1..51: note = Description of Artificial Sequence: Synthetic oligonucleotide
  source 1..51: mol_type = other DNA

SEQ ID NO: 2904 - DNA, 51 bp, synthetic construct; identical to SEQ ID NO: 2897
  misc_feature 1..51: note = Description of Artificial Sequence: Synthetic oligonucleotide
  source 1..51: mol_type = other DNA

SEQ ID NO: 2905 - DNA, 48 bp, synthetic construct; identical to SEQ ID NO: 2835
  misc_feature 1..48: note = Description of Artificial Sequence: Synthetic oligonucleotide
  source 1..48: mol_type = other DNA

SEQ ID NO: 2906 - DNA, 48 bp, synthetic construct; identical to SEQ ID NO: 2835
  misc_feature 1..48: note = Description of Artificial Sequence: Synthetic oligonucleotide
  source 1..48: mol_type = other DNA

SEQ ID NO: 2907 - DNA, 48 bp, synthetic construct; identical to SEQ ID NO: 2835
  misc_feature 1..48: note = Description of Artificial Sequence: Synthetic oligonucleotide
  source 1..48: mol_type = other DNA

SEQ ID NO: 2908 - DNA, 48 bp, synthetic construct; identical to SEQ ID NO: 2835
  misc_feature 1..48: note = Description of Artificial Sequence: Synthetic oligonucleotide
  source 1..48: mol_type = other DNA

SEQ ID NO: 2909 - DNA, 48 bp, synthetic construct; identical to SEQ ID NO: 2835
  misc_feature 1..48: note = Description of Artificial Sequence: Synthetic oligonucleotide
  source 1..48: mol_type = other DNA

SEQ ID NO: 2910 - DNA, 48 bp, synthetic construct; identical to SEQ ID NO: 2835
  misc_feature 1..48: note = Description of Artificial Sequence: Synthetic oligonucleotide
  source 1..48: mol_type = other DNA

SEQ ID NO: 2911 - DNA, 48 bp, synthetic construct; identical to SEQ ID NO: 2835
  misc_feature 1..48: note = Description of Artificial Sequence: Synthetic oligonucleotide
  source 1..48: mol_type = other DNA

SEQ ID NO: 2912 - DNA, 51 bp, synthetic construct
  misc_feature 1..51: note = Description of Artificial Sequence: Synthetic oligonucleotide
  source 1..51: mol_type = other DNA
tggatcaaccctgaaagtggtggcacagactattcacagaggtttcagggc

SEQ ID NO: 2913 - DNA, 51 bp, synthetic construct; identical to SEQ ID NO: 2912
  misc_feature 1..51: note = Description of Artificial Sequence: Synthetic oligonucleotide
  source 1..51: mol_type = other DNA

SEQ ID NO: 2914 - DNA, 51 bp, synthetic construct
  misc_feature 1..51: note = Description of Artificial Sequence: Synthetic oligonucleotide
  source 1..51: mol_type = other DNA
tggatcaaccctgacgctggtggcacagactattcacagaggtttcagggc

SEQ ID NO: 2915 - DNA, 51 bp, synthetic construct; identical to SEQ ID NO: 2914
  misc_feature 1..51: note = Description of Artificial Sequence: Synthetic oligonucleotide
  source 1..51: mol_type = other DNA

SEQ ID NO: 2916 - DNA, 51 bp, synthetic construct; identical to SEQ ID NO: 2831
  misc_feature 1..51: note = Description of Artificial Sequence: Synthetic oligonucleotide
  source 1..51: mol_type = other DNA

SEQ ID NO: 2917 - DNA, 51 bp, synthetic construct; identical to SEQ ID NO: 2831
  misc_feature 1..51: note = Description of Artificial Sequence: Synthetic oligonucleotide
  source 1..51: mol_type = other DNA

SEQ ID NO: 2918 - DNA, 51 bp, synthetic construct; identical to SEQ ID NO: 2831
  misc_feature 1..51: note = Description of Artificial Sequence: Synthetic oligonucleotide
  source 1..51: mol_type = other DNA

SEQ ID NO: 2919 - DNA, 51 bp, synthetic construct; identical to SEQ ID NO: 2914
  misc_feature 1..51: note = Description of Artificial Sequence: Synthetic oligonucleotide
  source 1..51: mol_type = other DNA

SEQ ID NO: 2920 - DNA, 51 bp, synthetic construct; identical to SEQ ID NO: 2914
  misc_feature 1..51: note = Description of Artificial Sequence: Synthetic oligonucleotide
  source 1..51: mol_type = other DNA

SEQ ID NO: 2921 - DNA, 51 bp, synthetic construct; identical to SEQ ID NO: 2914
  misc_feature 1..51: note = Description of Artificial Sequence: Synthetic oligonucleotide
  source 1..51: mol_type = other DNA

SEQ ID NO: 2922 - DNA, 51 bp, synthetic construct; identical to SEQ ID NO: 2912
  misc_feature 1..51: note = Description of Artificial Sequence: Synthetic oligonucleotide
  source 1..51: mol_type = other DNA

SEQ ID NO: 2923 - DNA, 51 bp, synthetic construct
  misc_feature 1..51: note = Description of Artificial Sequence: Synthetic oligonucleotide
  source 1..51: mol_type = other DNA
tggatcagccctaacagtggtgaaacaagctatgcacagaagtttcaggac

SEQ ID NO: 2924 - DNA, 51 bp, synthetic construct; identical to SEQ ID NO: 2833
  misc_feature 1..51: note = Description of Artificial Sequence: Synthetic oligonucleotide
  source 1..51: mol_type = other DNA

SEQ ID NO: 2925 - DNA, 51 bp, synthetic construct; identical to SEQ ID NO: 2923
  misc_feature 1..51: note = Description of Artificial Sequence: Synthetic oligonucleotide
  source 1..51: mol_type = other DNA

SEQ ID NO: 2926 - DNA, 51 bp, synthetic construct; identical to SEQ ID NO: 2923
  misc_feature 1..51: note = Description of Artificial Sequence: Synthetic oligonucleotide
  source 1..51: mol_type = other DNA

SEQ ID NO: 2927 - DNA, 51 bp, synthetic construct; identical to SEQ ID NO: 2833
  misc_feature 1..51: note = Description of Artificial Sequence: Synthetic oligonucleotide
  source 1..51: mol_type = other DNA

SEQ ID NO: 2928 - DNA, 51 bp, synthetic construct; identical to SEQ ID NO: 2923
  misc_feature 1..51: note = Description of Artificial Sequence: Synthetic oligonucleotide
  source 1..51: mol_type = other DNA

SEQ ID NO: 2929 - DNA, 51 bp, synthetic construct; identical to SEQ ID NO: 2833
  misc_feature 1..51: note = Description of Artificial Sequence: Synthetic oligonucleotide
  source 1..51: mol_type = other DNA

SEQ ID NO: 2930 - DNA, 51 bp, synthetic construct; identical to SEQ ID NO: 2923
  misc_feature 1..51: note = Description of Artificial Sequence: Synthetic oligonucleotide
  source 1..51: mol_type = other DNA

SEQ ID NO: 2931 - DNA, 51 bp, synthetic construct; identical to SEQ ID NO: 2923
  misc_feature 1..51: note = Description of Artificial Sequence: Synthetic oligonucleotide
  source 1..51: mol_type = other DNA

SEQ ID NO: 2932 - DNA, 51 bp, synthetic construct; identical to SEQ ID NO: 2912
  misc_feature 1..51: note = Description of Artificial Sequence: Synthetic oligonucleotide
  source 1..51: mol_type = other DNA

SEQ ID NO: 2933 - DNA, 51 bp, synthetic construct; identical to SEQ ID NO: 2912
  misc_feature 1..51: note = Description of Artificial Sequence: Synthetic oligonucleotide
  source 1..51: mol_type = other DNA

SEQ ID NO: 2934 - DNA, 51 bp, synthetic construct; identical to SEQ ID NO: 2831
  misc_feature 1..51: note = Description of Artificial Sequence: Synthetic oligonucleotide
  source 1..51: mol_type = other DNA

SEQ ID NO: 2935 - DNA, 51 bp, synthetic construct; identical to SEQ ID NO: 2912
  misc_feature 1..51: note = Description of Artificial Sequence: Synthetic oligonucleotide
  source 1..51: mol_type = other DNA

SEQ ID NO: 2936 - DNA, 51 bp, synthetic construct; identical to SEQ ID NO: 2912
  misc_feature 1..51: note = Description of Artificial Sequence: Synthetic oligonucleotide
  source 1..51: mol_type = other DNA

SEQ ID NO: 2937 - DNA, 51 bp, synthetic construct
  misc_feature 1..51: note = Description of Artificial Sequence: Synthetic oligonucleotide
  source 1..51: mol_type = other DNA
tggataagccctaaccaaggtgaaacaaactatgcacagaagtttcaggac

SEQ ID NO: 2938 - DNA, 51 bp, synthetic construct
  misc_feature 1..51: note = Description of Artificial Sequence: Synthetic oligonucleotide
  source 1..51: mol_type = other DNA
tggataagccctaaccaaggtgacacaaactatgcacagaagtttcaggac

SEQ ID NO: 2939 - DNA, 51 bp, synthetic construct; identical to SEQ ID NO: 2937
  misc_feature 1..51: note = Description of Artificial Sequence: Synthetic oligonucleotide
  source 1..51: mol_type = other DNA

SEQ ID NO: 2940 - DNA, 51 bp, synthetic construct
  misc_feature 1..51: note = Description of Artificial Sequence: Synthetic oligonucleotide
  source 1..51: mol_type = other DNA
tggataagccctaacaatggtgaaacaaactatgcacagaagtttcaggac

SEQ ID NO: 2941 - DNA, 51 bp, synthetic construct; identical to SEQ ID NO: 2834
  misc_feature 1..51: note = Description of Artificial Sequence: Synthetic oligonucleotide
  source 1..51: mol_type = other DNA

SEQ ID NO: 2942 - DNA, 51 bp, synthetic construct; identical to SEQ ID NO: 2938
  misc_feature 1..51: note = Description of Artificial Sequence: Synthetic oligonucleotide
  source 1..51: mol_type = other DNA

SEQ ID NO: 2943 - DNA, 51 bp, synthetic construct; identical to SEQ ID NO: 2940
  misc_feature 1..51: note = Description of Artificial Sequence: Synthetic oligonucleotide
  source 1..51: mol_type = other DNA

SEQ ID NO: 2944 - DNA, 51 bp, synthetic construct; identical to SEQ ID NO: 2937
  misc_feature 1..51: note = Description of Artificial Sequence: Synthetic oligonucleotide
  source 1..51: mol_type = other DNA

SEQ ID NO: 2945 - DNA, 51 bp, synthetic construct; identical to SEQ ID NO: 2834
  misc_feature 1..51: note = Description of Artificial Sequence: Synthetic oligonucleotide
  source 1..51: mol_type = other DNA

SEQ ID NO: 2946 - DNA, 51 bp, synthetic construct; identical to SEQ ID NO: 2938
  misc_feature 1..51: note = Description of Artificial Sequence: Synthetic oligonucleotide
  source 1..51: mol_type = other DNA

SEQ ID NO: 2947 - DNA, 51 bp, synthetic construct; identical to SEQ ID NO: 2940
  misc_feature 1..51: note = Description of Artificial Sequence: Synthetic oligonucleotide
  source 1..51: mol_type = other DNA

SEQ ID NO: 2948 - DNA, 51 bp, synthetic construct; identical to SEQ ID NO: 2937
  misc_feature 1..51: note = Description of Artificial Sequence: Synthetic oligonucleotide
  source 1..51: mol_type = other DNA

SEQ ID NO: 2949 - DNA, 51 bp, synthetic construct; identical to SEQ ID NO: 2937
  misc_feature 1..51: note = Description of Artificial Sequence: Synthetic oligonucleotide
  source 1..51: mol_type = other DNA

SEQ ID NO: 2950 - DNA, 51 bp, synthetic construct; identical to SEQ ID NO: 2827
  misc_feature 1..51: note = Description of Artificial Sequence: Synthetic oligonucleotide
  source 1..51: mol_type = other DNA

SEQ ID NO: 2951 - DNA, 51 bp, synthetic construct; identical to SEQ ID NO: 2827
  misc_feature 1..51: note = Description of Artificial Sequence: Synthetic oligonucleotide
  source 1..51: mol_type = other DNA

SEQ ID NO: 2952 - DNA, 51 bp, synthetic construct; identical to SEQ ID NO: 2827
  misc_feature 1..51: note = Description of Artificial Sequence: Synthetic oligonucleotide
  source 1..51: mol_type = other DNA

SEQ ID NO: 2953 - DNA, 51 bp, synthetic construct; identical to SEQ ID NO: 2827
  misc_feature 1..51: note = Description of Artificial Sequence: Synthetic oligonucleotide
  source 1..51: mol_type = other DNA

SEQ ID NO: 2954 - DNA, 51 bp, synthetic construct; identical to SEQ ID NO: 2827
  misc_feature 1..51: note = Description of Artificial Sequence: Synthetic oligonucleotide
  source 1..51: mol_type = other DNA

SEQ ID NO: 2955 - DNA, 51 bp, synthetic construct; identical to SEQ ID NO: 2827
  misc_feature 1..51: note = Description of Artificial Sequence: Synthetic oligonucleotide
  source 1..51: mol_type = other DNA

SEQ ID NO: 2956 - DNA, 51 bp, synthetic construct; identical to SEQ ID NO: 2827
  misc_feature 1..51: note = Description of Artificial Sequence: Synthetic oligonucleotide
  source 1..51: mol_type = other DNA

SEQ ID NO: 2957 - DNA, 51 bp, synthetic construct; identical to SEQ ID NO: 2827
  misc_feature 1..51: note = Description of Artificial Sequence: Synthetic oligonucleotide
  source 1..51: mol_type = other DNA

SEQ ID NO: 2958 - DNA, 51 bp, synthetic construct; identical to SEQ ID NO: 2827
  misc_feature 1..51: note = Description of Artificial Sequence: Synthetic oligonucleotide
  source 1..51: mol_type = other DNA

SEQ ID NO: 2959 - DNA, 51 bp, synthetic construct; identical to SEQ ID NO: 2827
  misc_feature 1..51: note = Description of Artificial Sequence: Synthetic oligonucleotide
  source 1..51: mol_type = other DNA

SEQ ID NO: 2960 - DNA, 51 bp, synthetic construct; identical to SEQ ID NO: 2827
  misc_feature 1..51: note = Description of Artificial Sequence: Synthetic oligonucleotide
  source 1..51: mol_type = other DNA

SEQ ID NO: 2961 - DNA, 51 bp, synthetic construct; identical to SEQ ID NO: 2827
  misc_feature 1..51: note = Description of Artificial Sequence: Synthetic oligonucleotide
  source 1..51: mol_type = other DNA

SEQ ID NO: 2962 - DNA, 51 bp, synthetic construct; identical to SEQ ID NO: 2827
  misc_feature 1..51: note = Description of Artificial Sequence: Synthetic oligonucleotide
  source 1..51: mol_type = other DNA

SEQ ID NO: 2963 - DNA, 51 bp, synthetic construct; identical to SEQ ID NO: 2827
  misc_feature 1..51: note = Description of Artificial Sequence: Synthetic oligonucleotide
  source 1..51: mol_type = other DNA

SEQ ID NO: 2964 - DNA, 51 bp, synthetic construct; identical to SEQ ID NO: 2847
  misc_feature 1..51: note = Description of Artificial Sequence: Synthetic oligonucleotide
  source 1..51: mol_type = other DNA

SEQ ID NO: 2965 - DNA, 51 bp, synthetic construct; identical to SEQ ID NO: 2841
  misc_feature 1..51: note = Description of Artificial Sequence: Synthetic oligonucleotide
  source 1..51: mol_type = other DNA

SEQ ID NO: 2966 - DNA, 51 bp, synthetic construct; identical to SEQ ID NO: 2827
  misc_feature 1..51: note = Description of Artificial Sequence: Synthetic oligonucleotide
  source 1..51: mol_type = other DNA

SEQ ID NO: 2967 - DNA, 51 bp, synthetic construct
  misc_feature 1..51: note = Description of Artificial Sequence: Synthetic oligonucleotide
  source 1..51: mol_type = other DNA
gttatatggtatgatggaagtaataagttccatgcagactccgtgaagggc

SEQ ID NO: 2968 - DNA, 51 bp, synthetic construct
  misc_feature 1..51: note = Description of Artificial Sequence: Synthetic oligonucleotide
  source 1..51: mol_type = other DNA
tggatgaaccctaacagtggtaacacaggctatgcacagaagttccagggc

SEQ ID NO: 2969 - DNA, 51 bp, synthetic construct
  misc_feature 1..51: note = Description of Artificial Sequence: Synthetic oligonucleotide
  source 1..51: mol_type = other DNA
gttatatggtatgatgcaagtaataagttccatgcagacgccgtgaagggc

SEQ ID NO: 2970 - DNA, 51 bp, synthetic construct; identical to SEQ ID NO: 2969
  misc_feature 1..51: note = Description of Artificial Sequence: Synthetic oligonucleotide
  source 1..51: mol_type = other DNA

SEQ ID NO: 2971 - DNA, 51 bp, synthetic construct; identical to SEQ ID NO: 2969
  misc_feature 1..51: note = Description of Artificial Sequence: Synthetic oligonucleotide
  source 1..51: mol_type = other DNA

SEQ ID NO: 2972 - DNA, 51 bp, synthetic construct; identical to SEQ ID NO: 2969
  misc_feature 1..51: note = Description of Artificial Sequence: Synthetic oligonucleotide
  source 1..51: mol_type = other DNA

SEQ ID NO: 2973 - DNA, 51 bp, synthetic construct
  misc_feature 1..51: note = Description of Artificial Sequence: Synthetic oligonucleotide
  source 1..51: mol_type = other DNA
gttatatggtatgatgcaagtaataagttccatgcagactccgtgaagggc

SEQ ID NO: 2974 - DNA, 51 bp, synthetic construct
  misc_feature 1..51: note = Description of Artificial Sequence: Synthetic oligonucleotide
  source 1..51: mol_type = other DNA
gttatatggtatgatggaagtaataagttccatgcagacgccgtgaagggc

SEQ ID NO: 2975 - DNA, 51 bp, synthetic construct
  misc_feature 1..51: note = Description of Artificial Sequence: Synthetic oligonucleotide
  source 1..51: mol_type = other DNA
tggatgaaccctaacagtggtggcacaggctatgcacagaagttccagggc

SEQ ID NO: 2976 - DNA, 51 bp, synthetic construct; identical to SEQ ID NO: 2968
  misc_feature 1..51: note = Description of Artificial Sequence: Synthetic oligonucleotide
  source 1..51: mol_type = other DNA

SEQ ID NO: 2977 - DNA, 51 bp, synthetic construct; identical to SEQ ID NO: 2975
  misc_feature 1..51: note = Description of Artificial Sequence: Synthetic oligonucleotide
  source 1..51: mol_type = other DNA

SEQ ID NO: 2978 - DNA, 51 bp, synthetic construct; identical to SEQ ID NO: 2975
  misc_feature 1..51: note = Description of Artificial Sequence: Synthetic oligonucleotide
  source 1..51: mol_type = other DNA

SEQ ID NO: 2979 - DNA, 51 bp, synthetic construct; identical to SEQ ID NO: 2975
  misc_feature 1..51: note = Description of Artificial Sequence: Synthetic oligonucleotide
  source 1..51: mol_type = other DNA

SEQ ID NO: 2980 - DNA, 51 bp, synthetic construct; identical to SEQ ID NO: 2968
  misc_feature 1..51: note = Description of Artificial Sequence: Synthetic oligonucleotide
  source 1..51: mol_type = other DNA

SEQ ID NO: 2981 - DNA, 51 bp, synthetic construct; identical to SEQ ID NO: 2975
  misc_feature 1..51: note = Description of Artificial Sequence: Synthetic oligonucleotide
  source 1..51: mol_type = other DNA

SEQ ID NO: 2982 - DNA, 51 bp, synthetic construct; identical to SEQ ID NO: 2975
  misc_feature 1..51: note = Description of Artificial Sequence: Synthetic oligonucleotide
  source 1..51: mol_type = other DNA

SEQ ID NO: 2983 - DNA, 51 bp, synthetic construct; identical to SEQ ID NO: 2969
  misc_feature 1..51: note = Description of Artificial Sequence: Synthetic oligonucleotide
  source 1..51: mol_type = other DNA

SEQ ID NO: 2984 - DNA, 57 bp, synthetic construct
  misc_feature 1..57: note = Description of Artificial Sequence: Synthetic oligonucleotide
  source 1..57: mol_type = other DNA
gggggggattacgtttgggggacttatcggcctcactactactacggtatggacgtc

SEQ ID NO: 2985 - DNA, 36 bp, synthetic construct
  misc_feature 1..36: note = Description of Artificial Sequence: Synthetic oligonucleotide
  source 1..36: mol_type = other DNA
gatgggacgatctttggagtggtcttgggggactac

SEQ ID NO: 2986 - DNA, 36 bp, synthetic construct
  misc_feature 1..36: note = Description of Artificial Sequence: Synthetic oligonucleotide
  source 1..36: mol_type = other DNA
gatgggacgatttttggagtgctcttgggggactac

SEQ ID NO: 2987 - DNA, 33 bp, synthetic construct
  misc_feature 1..33: note = Description of Artificial Sequence: Synthetic oligonucleotide
  source 1..33: mol_type = other DNA
gataggacgatttttggagtggttcttgactac

SEQ ID NO: 2988 - DNA, 42 bp, synthetic construct
  misc_feature 1..42: note = Description of Artificial Sequence: Synthetic oligonucleotide
  source 1..42: mol_type = other DNA
gaggccacgatttttggaatggttattgtaccgtttgactac

SEQ ID NO: 2989 - DNA, 42 bp, synthetic construct; identical to SEQ ID NO: 2988
  misc_feature 1..42: note = Description of Artificial Sequence: Synthetic oligonucleotide
  source 1..42: mol_type = other DNA

SEQ ID NO: 2990 - DNA, 42 bp, synthetic construct
  misc_feature 1..42: note = Description of Artificial Sequence: Synthetic oligonucleotide
  source 1..42: mol_type = other DNA
gaggccacgatttttggaatgcttattgtaccatttgactac

SEQ ID NO: 2991 - DNA, 42 bp, synthetic construct; identical to SEQ ID NO: 2990
  misc_feature 1..42: note = Description of Artificial Sequence: Synthetic oligonucleotide
  source 1..42: mol_type = other DNA

SEQ ID NO: 2992 - DNA, 48 bp, synthetic construct
  misc_feature 1..48: note = Description of Artificial Sequence: Synthetic oligonucleotide
  source 1..48: mol_type = other DNA
gatcgtattacgatttttggagtggttatggggggcggtatggacgtc

SEQ ID NO: 2993 - DNA, 33 bp, synthetic construct
  misc_feature 1..33: note = Description of Artificial Sequence: Synthetic oligonucleotide
  source 1..33: mol_type = other DNA
gatcaggcgatttttggagtggtccccgactac

SEQ ID NO: 2994 - DNA, 36 bp, synthetic construct; identical to SEQ ID NO: 2986
  misc_feature 1..36: note = Description of Artificial Sequence: Synthetic oligonucleotide
  source 1..36: mol_type = other DNA

SEQ ID NO: 2995 - DNA, 33 bp, synthetic construct
  misc_feature 1..33: note = Description of Artificial Sequence: Synthetic oligonucleotide
  source 1..33: mol_type = other DNA
gatcggacgatttttggagtggtccttgagtac

SEQ ID NO: 2996 - DNA, 27 bp, synthetic construct
  misc_feature 1..27: note = Description of Artificial Sequence: Synthetic oligonucleotide
  source 1..27: mol_type = other DNA
gatgtagcagtggctggctttgactac

SEQ ID NO: 2997 - DNA, 27 bp, synthetic construct
  misc_feature 1..27: note = Description of Artificial Sequence: Synthetic oligonucleotide
  source 1..27: mol_type = other DNA
gatgtagcagtggctggctttgactac

SEQ ID NO: 2998 - DNA, 36 bp, synthetic construct; identical to SEQ ID NO: 2986
  misc_feature 1..36: note = Description of Artificial Sequence: Synthetic oligonucleotide
  source 1..36: mol_type = other DNA

SEQ ID NO: 2999 - DNA, 36 bp, synthetic construct; identical to SEQ ID NO: 2986
  misc_feature 1..36: note = Description of Artificial Sequence: Synthetic oligonucleotide
  source 1..36: mol_type = other DNA

SEQ ID NO: 3000 - DNA, 36 bp, synthetic construct; identical to SEQ ID NO: 2986
  misc_feature 1..36: note = Description of Artificial Sequence: Synthetic oligonucleotide
  source 1..36: mol_type = other DNA

SEQ ID NO: 3001 - DNA, 36 bp, synthetic construct; identical to SEQ ID NO: 2986
  misc_feature 1..36: note = Description of Artificial Sequence: Synthetic oligonucleotide
  source 1..36: mol_type = other DNA

SEQ ID NO: 3002 - DNA, 36 bp, synthetic construct; identical to SEQ ID NO: 2986
  misc_feature 1..36: note = Description of Artificial Sequence: Synthetic oligonucleotide
  source 1..36: mol_type = other DNA

SEQ ID NO: 3003 - DNA, 36 bp, synthetic construct
  misc_feature 1..36: note = Description of Artificial Sequence: Synthetic oligonucleotide
  source 1..36: mol_type = other DNA
gataggacgatttttggagtgctcttgggggactac

SEQ ID NO: 3004 - DNA, 36 bp, synthetic construct; identical to SEQ ID NO: 2985
  misc_feature 1..36: note = Description of Artificial Sequence: Synthetic oligonucleotide
  source 1..36: mol_type = other DNA

SEQ ID NO: 3005 - DNA, 36 bp, synthetic construct; identical to SEQ ID NO: 2985
  misc_feature 1..36: note = Description of Artificial Sequence: Synthetic oligonucleotide
  source 1..36: mol_type = other DNA

SEQ ID NO: 3006 - DNA, 36 bp, synthetic construct; identical to SEQ ID NO: 2985
  misc_feature 1..36: note = Description of Artificial Sequence: Synthetic oligonucleotide
  source 1..36: mol_type = other DNA

SEQ ID NO: 3007 - DNA, 36 bp, synthetic construct; identical to SEQ ID NO: 2985
  misc_feature 1..36: note = Description of Artificial Sequence: Synthetic oligonucleotide
  source 1..36: mol_type = other DNA

SEQ ID NO: 3008 - DNA, 36 bp, synthetic construct; identical to SEQ ID NO: 2985
  misc_feature 1..36: note = Description of Artificial Sequence: Synthetic oligonucleotide
  source 1..36: mol_type = other DNA

SEQ ID NO: 3009 - DNA, 36 bp, synthetic construct
  misc_feature 1..36: note = Description of Artificial Sequence: Synthetic oligonucleotide
  source 1..36: mol_type = other DNA
gataggacgatctttggagtggtcttgggggactac

SEQ ID NO: 3010 - DNA, 36 bp, synthetic construct; identical to SEQ ID NO: 2985
  misc_feature 1..36: note = Description of Artificial Sequence: Synthetic oligonucleotide
  source 1..36: mol_type = other DNA

SEQ ID NO: 3011 - DNA, 36 bp, synthetic construct; identical to SEQ ID NO: 2985
  misc_feature 1..36: note = Description of Artificial Sequence: Synthetic oligonucleotide
  source 1..36: mol_type = other DNA

SEQ ID NO: 3012 - DNA, 36 bp, synthetic construct; identical to SEQ ID NO: 2985
  misc_feature 1..36: note = Description of Artificial Sequence: Synthetic oligonucleotide
  source 1..36: mol_type = other DNA

SEQ ID NO: 3013 - DNA, 36 bp, synthetic construct; identical to SEQ ID NO: 2985
  misc_feature 1..36: note = Description of Artificial Sequence: Synthetic oligonucleotide
  source 1..36: mol_type = other DNA

SEQ ID NO: 3014 - DNA, 36 bp, synthetic construct; identical to SEQ ID NO: 2985
  misc_feature 1..36: note = Description of Artificial Sequence: Synthetic oligonucleotide
  source 1..36: mol_type = other DNA

SEQ ID NO: 3015 - DNA, 36 bp, synthetic construct; identical to SEQ ID NO: 2985
  misc_feature 1..36: note = Description of Artificial Sequence: Synthetic oligonucleotide
  source 1..36: mol_type = other DNA

SEQ ID NO: 3016 - DNA, 36 bp, synthetic construct; identical to SEQ ID NO: 2985
  misc_feature 1..36: note = Description of Artificial Sequence: Synthetic oligonucleotide
  source 1..36: mol_type = other DNA

SEQ ID NO: 3017 - DNA, 36 bp, synthetic construct; identical to SEQ ID NO: 2985
  misc_feature 1..36: note = Description of Artificial Sequence: Synthetic oligonucleotide
  source 1..36: mol_type = other DNA

SEQ ID NO: 3018 - DNA, 36 bp, synthetic construct; identical to SEQ ID NO: 2985
  misc_feature 1..36: note = Description of Artificial Sequence: Synthetic oligonucleotide
  source 1..36: mol_type = other DNA

SEQ ID NO: 3019 - DNA, 36 bp, synthetic construct; identical to SEQ ID NO: 2985
  misc_feature 1..36: note = Description of Artificial Sequence: Synthetic oligonucleotide
  source 1..36: mol_type = other DNA

SEQ ID NO: 3020 - DNA, 36 bp, synthetic construct; identical to SEQ ID NO: 2985
  misc_feature 1..36: note = Description of Artificial Sequence: Synthetic oligonucleotide
  source 1..36: mol_type = other DNA

SEQ ID NO: 3021 - DNA, 36 bp, synthetic construct; identical to SEQ ID NO: 3009
  misc_feature 1..36: note = Description of Artificial Sequence: Synthetic oligonucleotide
  source 1..36: mol_type = other DNA

SEQ ID NO: 3022 - DNA, 36 bp, synthetic construct; identical to SEQ ID NO: 2985
  misc_feature 1..36: note = Description of Artificial Sequence: Synthetic oligonucleotide
  source 1..36: mol_type = other DNA

SEQ ID NO: 3023 - DNA, 33 bp, synthetic construct; identical to SEQ ID NO: 2987
  misc_feature 1..33: note = Description of Artificial Sequence: Synthetic oligonucleotide
  source 1..33: mol_type = other DNA

SEQ ID NO: 3024 - DNA, 33 bp, synthetic construct; identical to SEQ ID NO: 2987
  misc_feature 1..33: note = Description of Artificial Sequence: Synthetic oligonucleotide
  source 1..33: mol_type = other DNA

SEQ ID NO: 3025 - DNA, 33 bp, synthetic construct; identical to SEQ ID NO: 2987
  misc_feature 1..33: note = Description of Artificial Sequence: Synthetic oligonucleotide
  source 1..33: mol_type = other DNA

SEQ ID NO: 3026 - DNA, 33 bp, synthetic construct; identical to SEQ ID NO: 2987
  misc_feature 1..33: note = Description of Artificial Sequence: Synthetic oligonucleotide
  source 1..33: mol_type = other DNA

SEQ ID NO: 3027 - DNA, 33 bp, synthetic construct; identical to SEQ ID NO: 2987
  misc_feature 1..33: note = Description of Artificial Sequence: Synthetic oligonucleotide
  source 1..33: mol_type = other DNA

SEQ ID NO: 3028 - DNA, 33 bp, synthetic construct; identical to SEQ ID NO: 2987
  misc_feature 1..33: note = Description of Artificial Sequence: Synthetic oligonucleotide
  source 1..33: mol_type = other DNA

SEQ ID NO: 3029 - DNA, 33 bp, synthetic construct; identical to SEQ ID NO: 2987
  misc_feature 1..33: note = Description of Artificial Sequence: Synthetic oligonucleotide
  source 1..33: mol_type = other DNA

SEQ ID NO: 3030 - DNA, 33 bp, synthetic construct; identical to SEQ ID NO: 2987
  misc_feature 1..33: note = Description of Artificial Sequence: Synthetic oligonucleotide
  source 1..33: mol_type = other DNA

SEQ ID NO: 3031 - DNA, 33 bp, synthetic construct; identical to SEQ ID NO: 2987
  misc_feature 1..33: note = Description of Artificial Sequence: Synthetic oligonucleotide
  source 1..33: mol_type = other DNA

SEQ ID NO: 3032 - DNA, 36 bp, synthetic construct; identical to SEQ ID NO: 2986
  misc_feature 1..36: note = Description of Artificial Sequence: Synthetic oligonucleotide
  source 1..36: mol_type = other DNA

SEQ ID NO: 3033 - DNA, 36 bp, synthetic construct; identical to SEQ ID NO: 3003
  misc_feature 1..36: note = Description of Artificial Sequence: Synthetic oligonucleotide
  source 1..36: mol_type = other DNA

SEQ ID NO: 3034 - DNA, 36 bp, synthetic construct; identical to SEQ ID NO: 2986
  misc_feature 1..36: note = Description of Artificial Sequence: Synthetic oligonucleotide
  source 1..36: mol_type = other DNA

SEQ ID NO: 3035 - DNA, 36 bp, synthetic construct; identical to SEQ ID NO: 3003
  misc_feature 1..36: note = Description of Artificial Sequence: Synthetic oligonucleotide
  source 1..36: mol_type = other DNA

SEQ ID NO: 3036 - DNA, 36 bp, synthetic construct; identical to SEQ ID NO: 2986
  misc_feature 1..36: note = Description of Artificial Sequence: Synthetic oligonucleotide
  source 1..36: mol_type = other DNA

SEQ ID NO: 3037 - DNA, 36 bp, synthetic construct; identical to SEQ ID NO: 2986
  misc_feature 1..36: note = Description of Artificial Sequence: Synthetic oligonucleotide
  source 1..36: mol_type = other DNA

SEQ ID NO: 3038 - DNA, 36 bp, synthetic construct; identical to SEQ ID NO: 2986
  misc_feature 1..36: note = Description of Artificial Sequence: Synthetic oligonucleotide
  source 1..36: mol_type = other DNA

SEQ ID NO: 3039 - DNA, 33 bp, synthetic construct; identical to SEQ ID NO: 2995
  misc_feature 1..33: note = Description of Artificial Sequence: Synthetic oligonucleotide
  source 1..33: mol_type = other DNA

SEQ ID NO: 3040 - DNA, 33 bp, synthetic construct; identical to SEQ ID NO: 2995
  misc_feature 1..33: note = Description of Artificial Sequence: Synthetic oligonucleotide
  source 1..33: mol_type = other DNA

SEQ ID NO: 3041 - DNA, 33 bp, synthetic construct; identical to SEQ ID NO: 2995
  misc_feature 1..33: note = Description of Artificial Sequence: Synthetic oligonucleotide
  source 1..33: mol_type = other DNA

SEQ ID NO: 3042 - DNA, 33 bp, synthetic construct; identical to SEQ ID NO: 2995
  misc_feature 1..33: note = Description of Artificial Sequence: Synthetic oligonucleotide
  source 1..33: mol_type = other DNA

SEQ ID NO: 3043 - DNA, 33 bp, synthetic construct; identical to SEQ ID NO: 2995
  misc_feature 1..33: note = Description of Artificial Sequence: Synthetic oligonucleotide
  source 1..33: mol_type = other DNA

SEQ ID NO: 3044 - DNA, 33 bp, synthetic construct; identical to SEQ ID NO: 2995
  misc_feature 1..33: note = Description of Artificial Sequence: Synthetic oligonucleotide
  source 1..33: mol_type = other DNA

SEQ ID NO: 3045 - DNA, 33 bp, synthetic construct; identical to SEQ ID NO: 2995
  misc_feature 1..33: note = Description of Artificial Sequence: Synthetic oligonucleotide
  source 1..33: mol_type = other DNA

SEQ ID NO: 3046 - DNA, 33 bp, synthetic construct; identical to SEQ ID NO: 2995
  misc_feature 1..33: note = Description of Artificial Sequence: Synthetic oligonucleotide
  source 1..33: mol_type = other DNA

SEQ ID NO: 3047 - DNA, 33 bp, synthetic construct; identical to SEQ ID NO: 2995
  misc_feature 1..33: note = Description of Artificial Sequence: Synthetic oligonucleotide
  source 1..33: mol_type = other DNA

SEQ ID NO: 3048 - DNA, 33 bp, synthetic construct; identical to SEQ ID NO: 2995
  misc_feature 1..33: note = Description of Artificial Sequence: Synthetic oligonucleotide
  source 1..33: mol_type = other DNA

SEQ ID NO: 3049 - DNA, 33 bp, synthetic construct; identical to SEQ ID NO: 2995
  misc_feature 1..33: note = Description of Artificial Sequence: Synthetic oligonucleotide
  source 1..33: mol_type = other DNA

SEQ ID NO: 3050 - DNA, 33 bp, synthetic construct
  misc_feature 1..33: note = Description of Artificial Sequence: Synthetic oligonucleotide
  source 1..33: mol_type = other DNA
gggattacgatttttggtcatgggtttgaatat

SEQ ID NO: 3051 - DNA, 33 bp, synthetic construct; identical to SEQ ID NO: 3050
  misc_feature 1..33: note = Description of Artificial Sequence: Synthetic oligonucleotide
  source 1..33: mol_type = other DNA

SEQ ID NO: 3052 - DNA, 33 bp, synthetic construct; identical to SEQ ID NO: 3050
  misc_feature 1..33: note = Description of Artificial Sequence: Synthetic oligonucleotide
  source 1..33: mol_type = other DNA

SEQ ID NO: 3053 - DNA, 33 bp, synthetic construct; identical to SEQ ID NO: 3050
  misc_feature 1..33: note = Description of Artificial Sequence: Synthetic oligonucleotide
  source 1..33: mol_type = other DNA

SEQ ID NO: 3054 - DNA, 33 bp, synthetic construct; identical to SEQ ID NO: 2993
  misc_feature 1..33: note = Description of Artificial Sequence: Synthetic oligonucleotide
  source 1..33: mol_type = other DNA

SEQ ID NO: 3055 - DNA, 33 bp, synthetic construct; identical to SEQ ID NO: 2993
  misc_feature 1..33: note = Description of Artificial Sequence: Synthetic oligonucleotide
  source 1..33: mol_type = other DNA

SEQ ID NO: 3056 - DNA, 33 bp, synthetic construct; identical to SEQ ID NO: 2993
  misc_feature 1..33: note = Description of Artificial Sequence: Synthetic oligonucleotide
  source 1..33: mol_type = other DNA

SEQ ID NO: 3057 - DNA, 33 bp, synthetic construct; identical to SEQ ID NO: 2993
  misc_feature 1..33: note = Description of Artificial Sequence: Synthetic oligonucleotide
  source 1..33: mol_type = other DNA

SEQ ID NO: 3058 - DNA, 33 bp, synthetic construct; identical to SEQ ID NO: 2993
  misc_feature 1..33: note = Description of Artificial Sequence: Synthetic oligonucleotide
  source 1..33: mol_type = other DNA

SEQ ID NO: 3059 - DNA, 33 bp, synthetic construct; identical to SEQ ID NO: 2993
  misc_feature 1..33: note = Description of Artificial Sequence: Synthetic oligonucleotide
  source 1..33: mol_type = other DNA

SEQ ID NO: 3060 - DNA, 33 bp, synthetic construct; identical to SEQ ID NO: 2993
  misc_feature 1..33: note = Description of Artificial Sequence: Synthetic oligonucleotide
  source 1..33: mol_type = other DNA

SEQ ID NO: 3061 - DNA, 33 bp, synthetic construct; identical to SEQ ID NO: 2993
  misc_feature 1..33: note = Description of Artificial Sequence: Synthetic oligonucleotide
  source 1..33: mol_type = other DNA

SEQ ID NO: 3062 - DNA, 48 bp, synthetic construct; identical to SEQ ID NO: 2992
  misc_feature 1..48: note = Description of Artificial Sequence: Synthetic oligonucleotide
  source 1..48: mol_type = other DNA

SEQ ID NO: 3063 - DNA, 48 bp, synthetic construct; identical to SEQ ID NO: 2992
  misc_feature 1..48: note = Description of Artificial Sequence: Synthetic oligonucleotide
  source 1..48: mol_type = other DNA

SEQ ID NO: 3064 - DNA, 48 bp, synthetic construct; identical to SEQ ID NO: 2992
  misc_feature 1..48: note = Description of Artificial Sequence: Synthetic oligonucleotide
  source 1..48: mol_type = other DNA

SEQ ID NO: 3065 - DNA, 48 bp, synthetic construct; identical to SEQ ID NO: 2992
  misc_feature 1..48: note = Description of Artificial Sequence: Synthetic oligonucleotide
  source 1..48: mol_type = other DNA

SEQ ID NO: 3066 - DNA, 48 bp, synthetic construct; identical to SEQ ID NO: 2992
  misc_feature 1..48: note = Description of Artificial Sequence: Synthetic oligonucleotide
  source 1..48: mol_type = other DNA

SEQ ID NO: 3067 - DNA, 48 bp, synthetic construct; identical to SEQ ID NO: 2992
  misc_feature 1..48: note = Description of Artificial Sequence: Synthetic oligonucleotide
  source 1..48: mol_type = other DNA

SEQ ID NO: 3068 - DNA, 48 bp, synthetic construct; identical to SEQ ID NO: 2992
  misc_feature 1..48: note = Description of Artificial Sequence: Synthetic oligonucleotide
  source 1..48: mol_type = other DNA

SEQ ID NO: 3069 - DNA, 42 bp, synthetic construct; identical to SEQ ID NO: 2988
  misc_feature 1..42: note = Description of Artificial Sequence: Synthetic oligonucleotide
  source 1..42: mol_type = other DNA

SEQ ID NO: 3070 - DNA, 42 bp, synthetic construct; identical to SEQ ID NO: 2988
  misc_feature 1..42: note = Description of Artificial Sequence: Synthetic oligonucleotide
  source 1..42: mol_type = other DNA

SEQ ID NO: 3071 - DNA, 42 bp, synthetic construct; identical to SEQ ID NO: 2988
  misc_feature 1..42: note = Description of Artificial Sequence: Synthetic oligonucleotide
  source 1..42: mol_type = other DNA

SEQ ID NO: 3072 - DNA, 42 bp, synthetic construct; identical to SEQ ID NO: 2988
  misc_feature 1..42: note = Description of Artificial Sequence: Synthetic oligonucleotide
  source 1..42: mol_type = other DNA

SEQ ID NO: 3073 - DNA, 42 bp, synthetic construct; identical to SEQ ID NO: 2988
  misc_feature 1..42: note = Description of Artificial Sequence: Synthetic oligonucleotide
  source 1..42: mol_type = other DNA

SEQ ID NO: 3074 - DNA, 42 bp, synthetic construct; identical to SEQ ID NO: 2988
  misc_feature 1..42: note = Description of Artificial Sequence: Synthetic oligonucleotide
  source 1..42: mol_type = other DNA

SEQ ID NO: 3075 - DNA, 42 bp, synthetic construct; identical to SEQ ID NO: 2988
  misc_feature 1..42: note = Description of Artificial Sequence: Synthetic oligonucleotide
  source 1..42: mol_type = other DNA

SEQ ID NO: 3076 - DNA, 42 bp, synthetic construct; identical to SEQ ID NO: 2988
  misc_feature 1..42: note = Description of Artificial Sequence: Synthetic oligonucleotide
  source 1..42: mol_type = other DNA

SEQ ID NO: 3077 - DNA, 42 bp, synthetic construct; identical to SEQ ID NO: 2988
  misc_feature 1..42: note = Description of Artificial Sequence: Synthetic oligonucleotide
  source 1..42: mol_type = other DNA

SEQ ID NO: 3078 - DNA, 42 bp, synthetic construct; identical to SEQ ID NO: 2988
  misc_feature 1..42: note = Description of Artificial Sequence: Synthetic oligonucleotide
  source 1..42: mol_type = other DNA

SEQ ID NO: 3079 - DNA, 42 bp, synthetic construct; identical to SEQ ID NO: 2988
  misc_feature 1..42: note = Description of Artificial Sequence: Synthetic oligonucleotide
  source 1..42: mol_type = other DNA

SEQ ID NO: 3080 - DNA, 42 bp, synthetic construct; identical to SEQ ID NO: 2990
  misc_feature 1..42: note = Description of Artificial Sequence: Synthetic oligonucleotide
  source 1..42: mol_type = other DNA

SEQ ID NO: 3081 - DNA, 42 bp, synthetic construct; identical to SEQ ID NO: 2990
  misc_feature 1..42: note = Description of Artificial Sequence: Synthetic oligonucleotide
  source 1..42: mol_type = other DNA

SEQ ID NO: 3082 - DNA, 42 bp, synthetic construct; identical to SEQ ID NO: 2990
  misc_feature 1..42: note = Description of Artificial Sequence: Synthetic oligonucleotide
  source 1..42: mol_type = other DNA

SEQ ID NO: 3083 - DNA, 42 bp, synthetic construct; identical to SEQ ID NO: 2990
  misc_feature 1..42: note = Description of Artificial Sequence: Synthetic oligonucleotide
  source 1..42: mol_type = other DNA

SEQ ID NO: 3084 - DNA, 42 bp, synthetic construct; identical to SEQ ID NO: 2990
  misc_feature 1..42: note = Description of Artificial Sequence: Synthetic oligonucleotide
  source 1..42: mol_type = other DNA

SEQ ID NO: 3085 - DNA, 42 bp, synthetic construct; identical to SEQ ID NO: 2990
  misc_feature 1..42: note = Description of Artificial Sequence: Synthetic oligonucleotide
  source 1..42: mol_type = other DNA

SEQ ID NO: 3086 - DNA, 42 bp, synthetic construct; identical to SEQ ID NO: 2990
  misc_feature 1..42: note = Description of Artificial Sequence: Synthetic oligonucleotide
  source 1..42: mol_type = other DNA

SEQ ID NO: 3087 - DNA, 42 bp, synthetic construct; identical to SEQ ID NO: 2990
  misc_feature 1..42: note = Description of Artificial Sequence: Synthetic oligonucleotide
  source 1..42: mol_type = other DNA

SEQ ID NO: 3088 - DNA, 42 bp, synthetic construct; identical to SEQ ID NO: 2990
  misc_feature 1..42: note = Description of Artificial Sequence: Synthetic oligonucleotide
  source 1..42: mol_type = other DNA

SEQ ID NO: 3089 - DNA, 42 bp, synthetic construct; identical to SEQ ID NO: 2988
  misc_feature 1..42: note = Description of Artificial Sequence: Synthetic oligonucleotide
  source 1..42: mol_type = other DNA

SEQ ID NO: 3090 - DNA, 42 bp, synthetic construct; identical to SEQ ID NO: 2988
  misc_feature 1..42: note = Description of Artificial Sequence: Synthetic oligonucleotide
  source 1..42: mol_type = other DNA

SEQ ID NO: 3091 - DNA, 42 bp, synthetic construct; identical to SEQ ID NO: 2988
  misc_feature 1..42: note = Description of Artificial Sequence: Synthetic oligonucleotide
  source 1..42: mol_type = other DNA

SEQ ID NO: 3092 - DNA, 42 bp, synthetic construct; identical to SEQ ID NO: 2988
  misc_feature 1..42: note = Description of Artificial Sequence: Synthetic oligonucleotide
  source 1..42: mol_type = other DNA

SEQ ID NO: 3093 - DNA, 42 bp, synthetic construct; identical to SEQ ID NO: 2988
  misc_feature 1..42: note = Description of Artificial Sequence: Synthetic oligonucleotide
  source 1..42: mol_type = other DNA

SEQ ID NO: 3094 - DNA, 42 bp, synthetic construct; identical to SEQ ID NO: 2990
  misc_feature 1..42: note = Description of Artificial Sequence: Synthetic oligonucleotide
  source 1..42: mol_type = other DNA

SEQ ID NO: 3095 - DNA, 42 bp, synthetic construct; identical to SEQ ID NO: 2990
  misc_feature 1..42: note = Description of Artificial Sequence: Synthetic oligonucleotide
  source 1..42: mol_type = other DNA

SEQ ID NO: 3096 - DNA, 42 bp, synthetic construct; identical to SEQ ID NO: 2990
  misc_feature 1..42: note = Description of Artificial Sequence: Synthetic oligonucleotide
  source 1..42: mol_type = other DNA

SEQ ID NO: 3097 - DNA, 42 bp, synthetic construct; identical to SEQ ID NO: 2990
  misc_feature 1..42: note = Description of Artificial Sequence: Synthetic oligonucleotide
  source 1..42: mol_type = other DNA

SEQ ID NO: 3098 - DNA, 42 bp, synthetic construct; identical to SEQ ID NO: 2990
  misc_feature 1..42: note = Description of Artificial Sequence: Synthetic oligonucleotide
  source 1..42: mol_type = other DNA

SEQ ID NO: 3099 - DNA, 42 bp, synthetic construct; identical to SEQ ID NO: 2990
  misc_feature 1..42: note = Description of Artificial Sequence: Synthetic oligonucleotide
  source 1..42: mol_type = other DNA

SEQ ID NO: 3100 - DNA, 42 bp, synthetic construct; identical to SEQ ID NO: 2990
  misc_feature 1..42: note = Description of Artificial Sequence: Synthetic oligonucleotide
  source 1..42: mol_type = other DNA

SEQ ID NO: 3101 - DNA, 42 bp, synthetic construct; identical to SEQ ID NO: 2990
  misc_feature 1..42: note = Description of Artificial Sequence: Synthetic oligonucleotide
  source 1..42: mol_type = other DNA

SEQ ID NO: 3102 - DNA, 42 bp, synthetic construct; identical to SEQ ID NO: 2990
  misc_feature 1..42: note = Description of Artificial Sequence: Synthetic oligonucleotide
  source 1..42: mol_type = other DNA

SEQ ID NO: 3103 - DNA, 42 bp, synthetic construct; identical to SEQ ID NO: 2990
  misc_feature 1..42: note = Description of Artificial Sequence: Synthetic oligonucleotide
  source 1..42: mol_type = other DNA

SEQ ID NO: 3104 - DNA, 42 bp, synthetic construct; identical to SEQ ID NO: 2990
  misc_feature 1..42: note = Description of Artificial Sequence: Synthetic oligonucleotide
  source 1..42: mol_type = other DNA

SEQ ID NO: 3105 - DNA, 42 bp, synthetic construct; identical to SEQ ID NO: 2990
  misc_feature 1..42: note = Description of Artificial Sequence: Synthetic oligonucleotide
  source 1..42: mol_type = other DNA

SEQ ID NO: 3106 - DNA, 42 bp, synthetic construct; identical to SEQ ID NO: 2990
  misc_feature 1..42: note = Description of Artificial Sequence: Synthetic oligonucleotide
  source 1..42: mol_type = other DNA

SEQ ID NO: 3107 - DNA, 57 bp, synthetic construct; identical to SEQ ID NO: 2984
  misc_feature 1..57: note = Description of Artificial Sequence: Synthetic oligonucleotide
  source 1..57: mol_type = other DNA

SEQ ID NO: 3108 - DNA, 57 bp, synthetic construct; identical to SEQ ID NO: 2984
  misc_feature 1..57: note = Description of Artificial Sequence: Synthetic oligonucleotide
  source 1..57: mol_type = other DNA

SEQ ID NO: 3109 - DNA, 57 bp, synthetic construct; identical to SEQ ID NO: 2984
  misc_feature 1..57: note = Description of Artificial Sequence: Synthetic oligonucleotide
  source 1..57: mol_type = other DNA

SEQ ID NO: 3110 - DNA, 57 bp, synthetic construct; identical to SEQ ID NO: 2984
  misc_feature 1..57: note = Description of Artificial Sequence: Synthetic oligonucleotide
  source 1..57: mol_type = other DNA

SEQ ID NO: 3111 - DNA, 57 bp, synthetic construct; identical to SEQ ID NO: 2984
  misc_feature 1..57: note = Description of Artificial Sequence: Synthetic oligonucleotide
  source 1..57: mol_type = other DNA

SEQ ID NO: 3112 - DNA, 57 bp, synthetic construct; identical to SEQ ID NO: 2984
  misc_feature 1..57: note = Description of Artificial Sequence: Synthetic oligonucleotide
  source 1..57: mol_type = other DNA

SEQ ID NO: 3113 - DNA, 57 bp, synthetic construct; identical to SEQ ID NO: 2984
  misc_feature 1..57: note = Description of Artificial Sequence: Synthetic oligonucleotide
  source 1..57: mol_type = other DNA

SEQ ID NO: 3114 - DNA, 57 bp, synthetic construct; identical to SEQ ID NO: 2984
  misc_feature 1..57: note = Description of Artificial Sequence: Synthetic oligonucleotide
  source 1..57: mol_type = other DNA

SEQ ID NO: 3115 - DNA, 57 bp, synthetic construct; identical to SEQ ID NO: 2984
  misc_feature 1..57: note = Description of Artificial Sequence: Synthetic oligonucleotide
  source 1..57: mol_type = other DNA

SEQ ID NO: 3116 - DNA, 57 bp, synthetic construct; identical to SEQ ID NO: 2984
  misc_feature 1..57: note = Description of Artificial Sequence: Synthetic oligonucleotide
  source 1..57: mol_type = other DNA

SEQ ID NO: 3117 - DNA, 57 bp, synthetic construct; identical to SEQ ID NO: 2984
  misc_feature 1..57: note = Description of Artificial Sequence: Synthetic oligonucleotide
  source 1..57: mol_type = other DNA

SEQ ID NO: 3118 - DNA, 57 bp, synthetic construct; identical to SEQ ID NO: 2984
  misc_feature 1..57: note = Description of Artificial Sequence: Synthetic oligonucleotide
  source 1..57: mol_type = other DNA

SEQ ID NO: 3119 - DNA, 57 bp, synthetic construct
  misc_feature 1..57: note = Description of Artificial Sequence: Synthetic oligonucleotide
  source 1..57: mol_type = other DNA
gggggggattacgttttcgggacttatcggcctcactactactacggtatggacgtc

SEQ ID NO: 3120 - DNA, 57 bp, synthetic construct; identical to SEQ ID NO: 3119
  misc_feature 1..57: note = Description of Artificial Sequence: Synthetic oligonucleotide
  source 1..57: mol_type = other DNA

SEQ ID NO: 3121 - DNA, 36 bp, synthetic construct; identical to SEQ ID NO: 3009
  misc_feature 1..36: note = Description of Artificial Sequence: Synthetic oligonucleotide
  source 1..36: mol_type = other DNA

SEQ ID NO: 3122 - DNA, 36 bp, synthetic construct; identical to SEQ ID NO: 3003
  misc_feature 1..36: note = Description of Artificial Sequence: Synthetic oligonucleotide
  source 1..36: mol_type = other DNA

SEQ ID NO: 3123 - DNA, 57 bp, synthetic construct; identical to SEQ ID NO: 2984
  misc_feature 1..57: note = Description of Artificial Sequence: Synthetic oligonucleotide
  source 1..57: mol_type = other DNA

SEQ ID NO: 3124 - DNA, 36 bp, synthetic construct
  misc_feature 1..36: note = Description of Artificial Sequence: Synthetic oligonucleotide
  source 1..36: mol_type = other DNA
ggaaaagtggctggtatgcctgaagcttttgaaatc

SEQ ID NO: 3125 - DNA, 60 bp, synthetic construct
  misc_feature 1..60: note = Description of Artificial Sequence: Synthetic oligonucleotide
  source 1..60: mol_type = other DNA
gggggtgattacgtttgggggagttatcgtccctactactactactacggtatggacgtc

SEQ ID NO: 3126 - DNA, 36 bp, synthetic construct; identical to SEQ ID NO: 3124
  misc_feature 1..36: note = Description of Artificial Sequence: Synthetic oligonucleotide
  source 1..36: mol_type = other DNA

SEQ ID NO: 3127 - DNA, 36 bp, synthetic construct; identical to SEQ ID NO: 3124
  misc_feature 1..36: note = Description of Artificial Sequence: Synthetic oligonucleotide
  source 1..36: mol_type = other DNA

SEQ ID NO: 3128 - DNA, 36 bp, synthetic construct; identical to SEQ ID NO: 3124
  misc_feature 1..36: note = Description of Artificial Sequence: Synthetic oligonucleotide
  source 1..36: mol_type = other DNA

SEQ ID NO: 3129 - DNA, 36 bp, synthetic construct; identical to SEQ ID NO: 3124
  misc_feature 1..36: note = Description of Artificial Sequence: Synthetic oligonucleotide
  source 1..36: mol_type = other DNA

SEQ ID NO: 3130 - DNA, 36 bp, synthetic construct; identical to SEQ ID NO: 3124
  misc_feature 1..36: note = Description of Artificial Sequence: Synthetic oligonucleotide
  source 1..36: mol_type = other DNA

SEQ ID NO: 3131 - DNA, 36 bp, synthetic construct; identical to SEQ ID NO: 3124
  misc_feature 1..36: note = Description of Artificial Sequence: Synthetic oligonucleotide
  source 1..36: mol_type = other DNA

SEQ ID NO: 3132 - DNA, 60 bp, synthetic construct; identical to SEQ ID NO: 3125
  misc_feature 1..60: note = Description of Artificial Sequence: Synthetic oligonucleotide
  source 1..60: mol_type = other DNA

SEQ ID NO: 3133 - DNA, 60 bp, synthetic construct; identical to SEQ ID NO: 3125
  misc_feature 1..60: note = Description of Artificial Sequence: Synthetic oligonucleotide
  source 1..60: mol_type = other DNA

SEQ ID NO: 3134 - DNA, 60 bp, synthetic construct; identical to SEQ ID NO: 3125
  misc_feature 1..60: note = Description of Artificial Sequence: Synthetic oligonucleotide
  source 1..60: mol_type = other DNA

SEQ ID NO: 3135 - DNA, 60 bp, synthetic construct; identical to SEQ ID NO: 3125
  misc_feature 1..60: note = Description of Artificial Sequence: Synthetic oligonucleotide
  source 1..60: mol_type = other DNA

SEQ ID NO: 3136 - DNA, 60 bp, synthetic construct; identical to SEQ ID NO: 3125
  misc_feature 1..60: note = Description of Artificial Sequence: Synthetic oligonucleotide
  source 1..60: mol_type = other DNA

SEQ ID NO: 3137 - DNA, 60 bp, synthetic construct; identical to SEQ ID NO: 3125
  misc_feature 1..60: note = Description of Artificial Sequence: Synthetic oligonucleotide
  source 1..60: mol_type = other DNA

SEQ ID NO: 3138 - DNA, 60 bp, synthetic construct
  misc_feature 1..60: note = Description of Artificial Sequence: Synthetic oligonucleotide
  source 1..60: mol_type = other DNA
gggggtgattacgttttcgggagttatcgtccctactactactactacggtatggacgtc

SEQ ID NO: 3139 - DNA, 60 bp, synthetic construct; identical to SEQ ID NO: 3138
  misc_feature 1..60: note = Description of Artificial Sequence: Synthetic oligonucleotide
  source 1..60: mol_type = other DNA

SEQ ID NO: 3140 - DNA, 36 bp, synthetic construct; identical to SEQ ID NO: 3124
  misc_feature 1..36: note = Description of Artificial Sequence: Synthetic oligonucleotide
  source 1..36: mol_type = other DNA

SEQ ID NO: 3141 - protein, 466 aa, Homo sapiens
MTTSPILQLLLRLSLCGLLLQRAETGSKGQTAGELYQRWERYRRECQETLAAAEPPSGLACNGSFDMYVCWDYAAPNATARASCPWYLPWHHHVAAGFVLRQCGSDGQWGLWRDHTQCENPEKNEAFLDQRLILERLQVMYTVGYSLSLATLLLALLILSLFRRLHCTRNYIHINLFTSFMLRAAAILSRDRLLPRPGPYLGDQALALWNQALAACRTAQIVTQYCVGANYTWLLVEGVYLHSLLVLVGGSEEGHFRYYLLLGWGAPALFVIPWVIVRYLYENTQCWERNEVKAIWWIIRTPILMTILINFLIFIRILGILLSKLRTRQMRCRDYRLRLARSTLTLVPLLGVHEVVFAPVTEEQARGALRFAKLGFEIFLSSFQGFLVSVLYCFINKEVQSEIRRGWHHCRLRRSLGEEQRQLPERAFRALPSGSGPGEVPTSRGLSSGTLPGPGNEASRELESYC

SEQ ID NO: 3142 - DNA, 2024 bp, Homo sapiens
  source 1..2024: mol_type = other DNA
ggcagcggtggcaggggctgcaggagcaagtgaccaggagcaggactggggacaggcctgatcgcccctgcacgaaccagacccttcgccgccctcacgatgactacctctccgatcctgcagctgctgctgcggctctcactgtgcgggctgctgctccagagggcggagacaggctctaaggggcagacggcgggggagctgtaccagcgctgggaacggtaccgcagggagtgccaggagaccttggcagccgcggaaccgccttcaggcctcgcctgtaacgggtccttcgatatgtacgtctgctgggactatgctgcacccaatgccactgcccgtgcgtcctgcccctggtacctgccctggcaccaccatgtggctgcaggtttcgtcctccgccagtgtggcagtgatggccaatggggactttggagagaccatacacaatgtgagaacccagagaagaatgaggcctttctggaccaaaggctcatcttggagcggttgcaggtcatgtacactgtcggctactccctgtctctcgccacactgctgctagccctgctcatcttgagtttgttcaggcggctacattgcactagaaactatatccacatcaacctgttcacgtctttcatgctgcgagctgcggccattctcagccgagaccgtctgctacctcgacctggcccctaccttggggaccaggcccttgcgctgtggaaccaggccctcgctgcctgccgcacggcccagatcgtgacccagtactgcgtgggtgccaactacacgtggctgctggtggagggcgtctacctgcacagtctcctggtgctcgtgggaggctccgaggagggccacttccgctactacctgctcctcggctggggggcccccgcgcttttcgtcattccctgggtgatcgtcaggtacctgtacgagaacacgcagtgctgggagcgcaacgaagtcaaggccatttggtggattatacggacccccatcctcatgaccatcttgattaatttcctcatttttatccgcattcttggcattctcctgtccaagctgaggacacggcaaatgcgctgccgggattaccggctgaggctggctcgctccacgctgacgctggtgcccctgctgggtgtccacgaggtggtgtttgctcccgtgacagaggaacaggcccggggcgccctgcgcttcgccaagctcggctttgagatcttcctcagctccttccagggcttcctggtcagcgtcctctactgcttcatcaacaaggaggtgcagtcggagatccgccgtggctggcaccactgccgcctgcgccgcagcctgggcgaggagcaacgccagctcccggagcgcgccttccgggccctgccctccggctccggcccgggcgaggtccccaccagccgcggcttgtcctcggggaccctcccagggcctgggaatgaggccagccgggagttggaaagttactgctagggggcgggatccccgtgtctgttcagttagcatggatttattgagtgccaactgcgtgccaggcccagtacggaggacgctggggaaatggtgaaggaaacagaaaaaaggtccctgcccttctggagatgacaactgagtggggaaaacagaccgtgaacacaaaacatcaagttccacacacgctatggaatggttatgaagggaagcgagaagggggcctagggtggtctgggaggcgtctccaaggaggtgacacttaagccatccccgaaagaggtgaaagagatcactttggggagagctggagaacaggattctaggcggaagcgatagcataggcaaaggcccttgggcaggaaggcgctcagccttggctggagtagaattaagtcagagccaacaggtggggagagacagagaagtgggcaggggcacccaagttgggatttcatttcaggtgcattggagattcttaggagtgtctcttgggggtaatattttattttttaaaaaatgaggat

SEQ ID NO: 3143 - protein, 430 aa, Homo sapiens
MTTSPILQLLLRLSLCGLLLQRAETGSKGQTAGELYQRWERYRRECQETLAAAEPPSVAAGFVLRQCGSDGQWGLWRDHTQCENPEKNEAFLDQRLILERLQVMYTVGYSLSLATLLLALLILSLFRRLHCTRNYIHINLFTSFMLRAAAILSRDRLLPRPGPYLGDQALALWNQALAACRTAQIVTQYCVGANYTWLLVEGVYLHSLLVLVGGSEEGHFRYYLLLGWGAPALFVIPWVIVRYLYENTQCWERNEVKAIWWIIRTPILMTILINFLIFIRILGILLSKLRTRQMRCRDYRLRLARSTLTLVPLLGVHEVVFAPVTEEQARGALRFAKLGFEIFLSSFQGFLVSVLYCFINKEVQSEIRRGWHHCRLRRSLGEEQRQLPERAFRALPSGSGPGEVPTSRGLSSGTLPGPGNEASRELESYC

SEQ ID NO: 3144 - DNA, 1290 bp, Homo sapiens
  source 1..1290: mol_type = other DNA
atgaccaccagcccgattctgcagctgctgctgcgcctgagcctgtgcggcctgctgctgcagcgcgcggaaaccggcagcaaaggccagaccgcgggcgaactgtatcagcgctgggaacgctatcgccgcgaatgccaggaaaccctggcggcggcggaaccgccgagcgtggcggcgggctttgtgctgcgccagtgcggcagcgatggccagtggggcctgtggcgcgatcatacccagtgcgaaaacccggaaaaaaacgaagcgtttctggatcagcgcctgattctggaacgcctgcaggtgatgtataccgtgggctatagcctgagcctggcgaccctgctgctggcgctgctgattctgagcctgtttcgccgcctgcattgcacccgcaactatattcatattaacctgtttaccagctttatgctgcgcgcggcggcgattctgagccgcgatcgcctgctgccgcgcccgggcccgtatctgggcgatcaggcgctggcgctgtggaaccaggcgctggcggcgtgccgcaccgcgcagattgtgacccagtattgcgtgggcgcgaactatacctggctgctggtggaaggcgtgtatctgcatagcctgctggtgctggtgggcggcagcgaagaaggccattttcgctattatctgctgctgggctggggcgcgccggcgctgtttgtgattccgtgggtgattgtgcgctatctgtatgaaaacacccagtgctgggaacgcaacgaagtgaaagcgatttggtggattattcgcaccccgattctgatgaccattctgattaactttctgatttttattcgcattctgggcattctgctgagcaaactgcgcacccgccagatgcgctgccgcgattatcgcctgcgcctggcgcgcagcaccctgaccctggtgccgctgctgggcgtgcatgaagtggtgtttgcgccggtgaccgaagaacaggcgcgcggcgcgctgcgctttgcgaaactgggctttgaaatttttctgagcagctttcagggctttctggtgagcgtgctgtattgctttattaacaaagaagtgcagagcgaaattcgccgcggctggcatcattgccgcctgcgccgcagcctgggcgaagaacagcgccagctgccggaacgcgcgtttcgcgcgctgccgagcggcagcggcccgggcgaagtgccgaccagccgcggcctgagcagcggcaccctgccgggcccgggcaacgaagcgagccgcgaactggaaagctattgc

SEQ ID NO: 3145 - protein, 493 aa, synthetic construct
  REGION 1..493: note = Description of Artificial Sequence: Synthetic polypeptide
MTTSPILQLLLRLSLCGLLLQRAETGSKGQTAGELYQRWERYRRECQETLAAAEPPSGLACNGSFDMYVCWDYAAPNATARASCPWYLPWHHHVAAGFVLRQCGSDGQWGLWRDHTQCENPEKNEAFLDQRLILERLQVMYTVGYSLSLATLLLALLILSLFRRLHCTRNYIHINLFTSFMLRAAAILSRDRLLPRPGPYLGDQALALWNQALAACRTAQIVTQYCVGANYTWLLVEGVYLHSLLVLVGGSEEGHFRYYLLLGWGAPALFVIPWVIVRYLYENTQCWERNEVKAIWWIIRTPILMTILINFLIFIRILGILLSKLRTRQMRCRDYRLRLARSTLTLVPLLGVHEVVFAPVTEEQARGALRFAKLGFEIFLSSFQGFLVSVLYCFINKEVGRDPAAAPALWRRRGTAPPLSAIVSQVQSEIRRGWHHCRLRRSLGEEQRQLPERAFRALPSGSGPGEVPTSRGLSSGTLPGPGNEASRELESYC

SEQ ID NO: 3146 - DNA, 1482 bp, synthetic construct
  misc_feature 1..1482: note = Description of Artificial Sequence: Synthetic polynucleotide
  source 1..1482: mol_type = other DNA
atgaccaccagcccgattctgcagctgctgctgcgcctgagcctgtgcggcctgctgctgcagcgcgcggaaaccggcagcaaaggccagaccgcgggcgaactgtatcagcgctgggaacgctatcgccgcgaatgccaggaaaccctggcggcggcggaaccgccgagcggcctggcgtgcaacggcagctttgatatgtatgtgtgctgggattatgcggcgccgaacgcgaccgcgcgcgcgagctgcccgtggtatctgccgtggcatcatcatgtggcggcgggctttgtgctgcgccagtgcggcagcgatggccagtggggcctgtggcgcgatcatacccagtgcgaaaacccggaaaaaaacgaagcgtttctggatcagcgcctgattctggaacgcctgcaggtgatgtataccgtgggctatagcctgagcctggcgaccctgctgctggcgctgctgattctgagcctgtttcgccgcctgcattgcacccgcaactatattcatattaacctgtttaccagctttatgctgcgcgcggcggcgattctgagccgcgatcgcctgctgccgcgcccgggcccgtatctgggcgatcaggcgctggcgctgtggaaccaggcgctggcggcgtgccgcaccgcgcagattgtgacccagtattgcgtgggcgcgaactatacctggctgctggtggaaggcgtgtatctgcatagcctgctggtgctggtgggcggcagcgaagaaggccattttcgctattatctgctgctgggctggggcgcgccggcgctgtttgtgattccgtgggtgattgtgcgctatctgtatgaaaacacccagtgctgggaacgcaacgaagtgaaagcgatttggtggattattcgcaccccgattctgatgaccattctgattaactttctgatttttattcgcattctgggcattctgctgagcaaactgcgcacccgccagatgcgctgccgcgattatcgcctgcgcctggcgcgcagcaccctgaccctggtgccgctgctgggcgtgcatgaagtggtgtttgcgccggtgaccgaagaacaggcgcgcggcgcgctgcgctttgcgaaactgggctttgaaatttttctgagcagctttcagggctttctggtgagcgtgctgtattgctttattaacaaagaagtgggccgcgatccggcggcggcgccggcgctgtggcgccgccgcggcaccgcgccgccgctgagcgcgattgtgagccaggtgcagagcgaaattcgccgcggctggcatcattgccgcctgcgccgcagcctgggcgaagaacagcgccagctgccggaacgcgcgtttcgcgcgctgccgagcggcagcggcccgggcgaagtgccgaccagccgcggcctgagcagcggcaccctgccgggcccgggcaacgaagcgagccgcgaactggaaagctattgctaa

SEQ ID NO: 3147 - protein, 460 aa, Mus musculus
MPLRLLLLLLWLWGLQWAETDSEGQTTTGELYQRWEHYGQECQKMLETTEPPSGLACNGSFDMYACWNYTAANTTARVSCPWYLPWFRQVSAGFVFRQCGSDGQWGSWRDHTQCENPEKNGAFQDQTLILERLQIMYTVGYSLSLTTLLLALLILSLFRRLHCTRNYIHMNLFTSFMLRAAAILTRDQLLPPLGPYTGDQAPTPWNQALAACRTAQIMTQYCVGANYTWLLVEGVYLHHLLVIVGRSEKGHFRCYLLLGWGAPALFVIPWVIVRYLRENTQCWERNEVKAIWWIIRTPILITILINFLIFIRILGILVSKLRTRQMRCPDYRLRLARSTLTLVPLLGVHEVVFAPVTEEQVEGSLRFAKLAFEIFLSSFQGFLVSVLYCFINKEVQSEIRQGWRHRRLRLSLQEQRPRPHQELAPRAVPLSSACREAAVGNALPSGMLHVPGDEVLESYC

SEQ ID NO: 3148 - DNA, 1383 bp, Mus musculus
  source 1..1383: mol_type = other DNA
atgccgctgcgcctgctgctgctgctgctgtggctgtggggcctgcagtgggcggaaaccgatagcgaaggccagaccaccaccggcgaactgtatcagcgctgggaacattatggccaggaatgccagaaaatgctggaaaccaccgaaccgccgagcggcctggcgtgcaacggcagctttgatatgtatgcgtgctggaactataccgcggcgaacaccaccgcgcgcgtgagctgcccgtggtatctgccgtggtttcgccaggtgagcgcgggctttgtgtttcgccagtgcggcagcgatggccagtggggcagctggcgcgatcatacccagtgcgaaaacccggaaaaaaacggcgcgtttcaggatcagaccctgattctggaacgcctgcagattatgtataccgtgggctatagcctgagcctgaccaccctgctgctggcgctgctgattctgagcctgtttcgccgcctgcattgcacccgcaactatattcatatgaacctgtttaccagctttatgctgcgcgcggcggcgattctgacccgcgatcagctgctgccgccgctgggcccgtataccggcgatcaggcgccgaccccgtggaaccaggcgctggcggcgtgccgcaccgcgcagattatgacccagtattgcgtgggcgcgaactatacctggctgctggtggaaggcgtgtatctgcatcatctgctggtgattgtgggccgcagcgaaaaaggccattttcgctgctatctgctgctgggctggggcgcgccggcgctgtttgtgattccgtgggtgattgtgcgctatctgcgcgaaaacacccagtgctgggaacgcaacgaagtgaaagcgatttggtggattattcgcaccccgattctgattaccattctgattaactttctgatttttattcgcattctgggcattctggtgagcaaactgcgcacccgccagatgcgctgcccggattatcgcctgcgcctggcgcgcagcaccctgaccctggtgccgctgctgggcgtgcatgaagtggtgtttgcgccggtgaccgaagaacaggtggaaggcagcctgcgctttgcgaaactggcgtttgaaatttttctgagcagctttcagggctttctggtgagcgtgctgtattgctttattaacaaagaagtgcagagcgaaattcgccagggctggcgccatcgccgcctgcgcctgagcctgcaggaacagcgcccgcgcccgcatcaggaactggcgccgcgcgcggtgccgctgagcagcgcgtgccgcgaagcggcggtgggcaacgcgctgccgagcggcatgctgcatgtgccgggcgatgaagtgctggaaagctattgctaa

SEQ ID NO: 3149 - protein, 230 aa, synthetic construct
  REGION 1..230: note = Description of Artificial Sequence: Synthetic polypeptide
MPLRLLLLLLWLWGLQWAETDSEGQTTTGELYQRWEHYGQECQKMLETTEPPSGLACNGSFDMYACWNYTAANTTARVSCPWYLPWFRQVSAGFVFRQCGSDGQWGSWRDHTQCENPEKNGAFQDQTLILERLQIMYTVGYSLSLTTLLLALLILSLFRRLHCTRNYIHMNLFTSFMLRAAAILTRDQLLPPLGPYTGDQAPTPWNQVLHRLLPGGTKTFPIYFRTFPHH

SEQ ID NO: 3150 - DNA, 693 bp, synthetic construct
  misc_feature 1..693: note = Description of Artificial Sequence: Synthetic polynucleotide
  source 1..693: mol_type = other DNA
atgccgctgcgcctgctgctgctgctgctgtggctgtggggcctgcagtgggcggaaaccgatagcgaaggccagaccaccaccggcgaactgtatcagcgctgggaacattatggccaggaatgccagaaaatgctggaaaccaccgaaccgccgagcggcctggcgtgcaacggcagctttgatatgtatgcgtgctggaactataccgcggcgaacaccaccgcgcgcgtgagctgcccgtggtatctgccgtggtttcgccaggtgagcgcgggctttgtgtttcgccagtgcggcagcgatggccagtggggcagctggcgcgatcatacccagtgcgaaaacccggaaaaaaacggcgcgtttcaggatcagaccctgattctggaacgcctgcagattatgtataccgtgggctatagcctgagcctgaccaccctgctgctggcgctgctgattctgagcctgtttcgccgcctgcattgcacccgcaactatattcatatgaacctgtttaccagctttatgctgcgcgcggcggcgattctgacccgcgatcagctgctgccgccgctgggcccgtataccggcgatcaggcgccgaccccgtggaaccaggtgctgcatcgcctgctgccgggcggcaccaaaacctttccgatttattttcgcacctttccgcatcattaa

SEQ ID NO: 3151 - protein, 42 aa, Homo sapiens
YAEGTFISDYSIAMDKIHQQDFVNWLLAQKGKKNDWKHNITQ

SEQ ID NO: 3152 - DNA, 126 bp, Homo sapiens
  source 1..126: mol_type = other DNA
tatgcggaaggcacctttattagcgattatagcattgcgatggataaaattcatcagcaggattttgtgaactggctgctggcgcagaaaggcaaaaaaaacgattggaaacataacattacccag

SEQ ID NO: 3153 - protein, 42 aa, Mus musculus
YAEGTFISDYSIAMDKIRQQDFVNWLLAQRGKKSDWKHNITQ

SEQ ID NO: 3154 - DNA, 126 bp, Mus musculus
  source 1..126: mol_type = other DNA
tatgcggaaggcacctttattagcgattatagcattgcgatggataaaattcgccagcaggattttgtgaactggctgctggcgcagcgcggcaaaaaaagcgattggaaacataacattacccag

SEQ ID NO: 3155 - protein, 42 aa, Rattus sp.
YAEGTFISDYSIAMDKIRQQDFVNWLLAQKGKKNDWKHNLTQ

SEQ ID NO: 3156 - DNA, 126 bp, Rattus sp.
  source 1..126: mol_type = other DNA
tatgcggaaggcacctttattagcgattatagcattgcgatggataaaattcgccagcaggattttgtgaactggctgctggcgcagaaaggcaaaaaaaacgattggaaacataacctgacccag

SEQ ID NO: 3157 - protein, 22 aa, Homo sapiens
MDMRVPAQLLGLLLLWLRGARC

SEQ ID NO: 3158 - DNA, 66 bp, Homo sapiens
  source 1..66: mol_type = other DNA
atggacatgagagtgcctgcacagctgctgggcctgctgctgctgtggctgagaggcgccagatgc

SEQ ID NO: 3159 - protein, 19 aa, Homo sapiens
MAWALLLLTLLTQGTGSWA

SEQ ID NO: 3160 - DNA, 57 bp, Homo sapiens
  source 1..57: mol_type = other DNA
atggcctgggctctgctgctcctcaccctcctcactcagggcacagggtcctgggcc

SEQ ID NO: 3161 - protein, 239 aa, synthetic construct
  REGION 1..239: note = Description of Artificial Sequence: Synthetic polypeptide
MKLPVRLLVLMFWIPASSSDVVMTQTPLSLPVSLGDQASISCRSSQSLVHSNGDTYLHWYLQKPGQSPKLLIYKVSNRFSGVPDRFSGSGSGTDFTLKISRVEAADLGVYFCSQSTHVPPFTFGGGTKLEIKRADAAPTVSIFPPSSEQLTSGGASVVCFLNNFYPKDINVKWKIDGSERQNGVLNSWTDQDSKDSTYSMSSTLTLTKDEYERHNSYTCEATHKTSTSPIVKSFNRNEC

SEQ ID NO: 3162 - protein, 462 aa, synthetic construct
  REGION 1..462: note = Description of Artificial Sequence: Synthetic polypeptide
MGWSYIILFLVATATDVHSQVQLQQPGAELVKPGASVKLSCRASGYTFTSNWMHWVKQRPRQGLEWIGEINPSNGRSNYNEKFKTKATLTVDKSSSTAYMQLSSLTSEDSAVYYCARFYYGTSWFAYWGQGTLVAVSAAKTTPPSVYPLAPGSAAQTNSMVTLGCLVKGYFPEPVTVTWNSGSLSSGVHTFPAVLQSDLYTLSSSVTVPSSTWPSETVTCNVAHPASSTKVDKKIVPRDCGCKPCICTVPEVSSVFIFPPKPKDVLTITLTPKVTCVVVDISKDDPEVQFSWFVDDVEVHTAQTQPREEQFASTFRSVSELPIMHQDWLNGKEFKCRVNSAAFPAPIEKTISKTKGRPKAPQVYTIPPPKEQMAKDKVSLTCMITDFFPEDITVEWQWNGQPAENYKNTQPIMDTDGSYFVYSKLNVQKSNWEAGNTFTCSVLHEGLHNHHTEKSLSHSPGK

SEQ ID NO: 3163 - protein, 39 aa, Heloderma suspectum
HGEGTFTSDLSKQMEEEAVRLFIEWLKNGGPSSGAPPPS

SEQ ID NO: 3164 - protein, 39 aa, Heloderma horridum
HSDGTFTSDLSKQMEEEAVRLFIEWLKNGGPSSGAPPPS

SEQ ID NO: 3165 - protein, 39 aa, Heloderma suspectum
HGEGTFTSDLSKQLEEEAVRLFIEWLKNGGPSSGAPPPS

SEQ ID NO: 3166 - protein, 39 aa, Heloderma suspectum
HGEGTFTSDLSKQLEEEAVRLFIEFLKNGGPSSGAPPPS

SEQ ID NO: 3167 - protein, 39 aa, Heloderma suspectum
HGEGTFTSDLSKQLEEEAARLFIEFLKNGGPSSGAPPPS

SEQ ID NO: 3168 - protein, 30 aa, Heloderma suspectum
HGEGTFTSDLSKQMEEEAVRLFIEWLKNGG

SEQ ID NO: 3169 - protein, 30 aa, Heloderma suspectum
HGEGTFTSDLSKQLEEEAVRLFIEWLKNGG

SEQ ID NO: 3170 - protein, 30 aa, Heloderma suspectum
HGEGTFTSDLSKQLEEEAVRLFIEFLKNGG

SEQ ID NO: 3171 - protein, 30 aa, Heloderma suspectum
HGEGTFTSDLSKQLEEEAARLFIEFLKNGG

SEQ ID NO: 3172 - protein, 28 aa, Heloderma suspectum
HGEGTFTSDLSKQMEEEAVRLFIEWLKN

SEQ ID NO: 3173 - protein, 28 aa, Heloderma suspectum
HGEGTFTSDLSKQLEEEAVRLFIEWLKN

SEQ ID NO: 3174 - protein, 28 aa, Heloderma suspectum
HGEGTFTSDLSKQLEEEAVRLFIEFLKN

SEQ ID NO: 3175 - protein, 28 aa, Heloderma suspectum
HGEGTFTSDLSKQLEEEAARLFIEFLKN

SEQ ID NO: 3176 - protein, 39 aa, Heloderma suspectum
HGEGTFTSDLSKQLEEKAAKEFIEFLKQGGPSSGAPPPS

SEQ ID NO: 3177 - protein, 39 aa, Heloderma suspectum
HGEGTFTSDLSKQLEEKAAKEFIEWLKQGGPSSGAPPPS

SEQ ID NO: 3178 - protein, 39 aa, Heloderma suspectum
  MOD_RES 14: note = OctylGly
HGEGTFTSDLSKQGEEEAVRLFIEWLKQGGPSSGAPPPS

SEQ ID NO: 3179 - protein, 39 aa, Heloderma suspectum
  MOD_RES 34: note = OctylGly
HGEGTFTSDLSKQLEEEAVRLFIEWLKQGGPSSGAPPPS

SEQ ID NO: 3180 - protein, 37 aa, Heloderma suspectum
HGEFTFTSDLSKQLEEEAVRLFIEWLKQGGPSKEIIS

SEQ ID NO: 3181 - protein, 39 aa, Heloderma suspectum
HGEFTFTSDLSKQLEEKAAKEFIEWLKQGGPSSGAPPPS

SEQ ID NO: 3182 - protein, 39 aa, Heloderma suspectum
HGEGTFTSDLVKILEAEAVRKFIEFLKNGGPSSGAPPPS

SEQ ID NO: 3183 - protein, 40 aa, Heloderma suspectum
HGEGTFTSDLSKQMEEEAVRLFIEWLKNGGPSSGAPPPSK

SEQ ID NO: 3184 - protein, 31 aa, Homo sapiens
HAEGTFTSDVSSYLEGQAAKEFIAWLVKGRG

SEQ ID NO: 3185 - protein, 30 aa, synthetic construct
  REGION 1..30: note = Description of Artificial Sequence: Synthetic polypeptide
HAEGTFTSDVSSYLEGQAAKEFIAWLVKGR

SEQ ID NO: 3186 - protein, 30 aa, synthetic construct
  REGION 1..30: note = Description of Artificial Sequence: Synthetic polypeptide
  MOD_RES 2: note = Aib
  MOD_RES 29: note = Aib
HXEGTFTSDVSSYLEGQAAREFIAFLVRXR

SEQ ID NO: 3187 - protein, 31 aa, synthetic construct
  REGION 1..31: note = Description of Artificial Sequence: Synthetic polypeptide
  MOD_RES 2: note = Ala, Val or Gly
  MOD_RES 16: note = Gly, Lys or Glu
  MOD_RES 17: note = Gln or Lys
  MOD_RES 24: note = Ala or Glu
  MOD_RES 27: note = Val or Lys
  MOD_RES 28: note = Lys, Asn or Arg
  MOD_RES 30: note = Arg or Gly
  MOD_RES 31: note = Gly, His, Pro or not present
HXEGTFTSDVSSYLEXXAAKEFIXWLXXGXX

SEQ ID NO: 3188 - protein, 31 aa, synthetic construct
  REGION 1..31: note = Description of Artificial Sequence: Synthetic polypeptide
HAEGTFTSDVSSYLEGQAAKEFIAWLVRGRG

SEQ ID NO: 3189 - protein, 31 aa, synthetic construct
  REGION 1..31: note = Description of Artificial Sequence: Synthetic polypeptide
HAEGTFTSDVSSYLEGQAAKEFIEWLVKGRG

SEQ ID NO: 3190 - protein, 31 aa, synthetic construct
  REGION 1..31: note = Description of Artificial Sequence: Synthetic polypeptide
HAEGTFTSDVSSYLEKQAAKEFIAWLVKGRG

SEQ ID NO: 3191 - protein, 31 aa, synthetic construct
  REGION 1..31: note = Description of Artificial Sequence: Synthetic polypeptide
HGEGTFTSDVSSYLEEQAAKEFIAWLVKGGG

SEQ ID NO: 3192 - protein, 31 aa, synthetic construct
  REGION 1..31: note = Description of Artificial Sequence: Synthetic polypeptide
HVEGTFTSDVSSYLEEQAAKEFIAWLVKGGG

SEQ ID NO: 3193 - protein, 31 aa, synthetic construct
  REGION 1..31: note = Description of Artificial Sequence: Synthetic polypeptide
HGEGTFTSDVSSYLEEQAAKEFIAWLKNGGG

SEQ ID NO: 3194 - protein, 31 aa, synthetic construct
  REGION 1..31: note = Description of Artificial Sequence: Synthetic polypeptide
HVEGTFTSDVSSYLEEQAAKEFIAWLKNGGG

SEQ ID NO: 3195 - protein, 31 aa, synthetic construct
  REGION 1..31: note = Description of Artificial Sequence: Synthetic polypeptide
HGEGTFTSDVSSYLEEQAAKEFIAWLVKGGP

SEQ ID NO: 3196 - protein, 31 aa, synthetic construct
  REGION 1..31: note = Description of Artificial Sequence: Synthetic polypeptide
HVEGTFTSDVSSYLEEQAAKEFIAWLVKGGP

SEQ ID NO: 3197 - protein, 31 aa, synthetic construct
  REGION 1..31: note = Description of Artificial Sequence: Synthetic polypeptide
HGEGTFTSDVSSYLEEQAAKEFIAWLKNGGP

SEQ ID NO: 3198 - protein, 31 aa, synthetic construct
  REGION 1..31: note = Description of Artificial Sequence: Synthetic polypeptide
HVEGTFTSDVSSYLEEQAAKEFIAWLKNGGP

SEQ ID NO: 3199 - protein, 30 aa, synthetic construct
  REGION 1..30: note = Description of Artificial Sequence: Synthetic polypeptide
HGEGTFTSDVSSYLEEQAAKEFIAWLVKGG

SEQ ID NO: 3200 - protein, 30 aa, synthetic construct
  REGION 1..30: note = Description of Artificial Sequence: Synthetic polypeptide
HVEGTFTSDVSSYLEEQAAKEFIAWLVKGG

SEQ ID NO: 3201 - protein, 30 aa, synthetic construct
  REGION 1..30: note = Description of Artificial Sequence: Synthetic polypeptide
HVEGTFTSDVSSYLEEQAAKEFIAWLVNGG

SEQ ID NO: 3202 - protein, 30 aa, synthetic construct
  REGION 1..30: note = Description of Artificial Sequence: Synthetic polypeptide
HGEGTFTSDVSSYLEEQAAKEFIAWLVNGG

SEQ ID NO: 3203 - protein, 230 aa, synthetic construct
  REGION 1..230: note = Description of Artificial Sequence: Synthetic polypeptide
  MOD_RES 16: note = Pro or Glu
  MOD_RES 17: note = Phe, Val or Ala
  MOD_RES 18: note = Leu, Glu or Ala
  MOD_RES 80: note = Asn or Ala
  SITE 230: note = MISC_FEATURE - May or may not be present
AESKYGPPCPPCPAPXXXGGPSVFLFPPKPKDTLMISRTPEVTCVVVDVSQEDPEVQFNWYVDGVEVHNAKTKPREEQFXSTYRVVSVLTVLHQDWLNGKEYKCKVSNKGLPSSIEKTISKAKGQPREPQVYTLPPSQEEMTKNQVSLTCLVKGFYPSDIAVEWESNGQPENNYKTTPPVLDSDGSFFLYSRLTVDKSRWQEGNVFSCSVMHEALHNHYTQKSLSLSLGK

SEQ ID NO: 3204 - protein, 30 aa, synthetic construct
  REGION 1..30: note = Description of Artificial Sequence: Synthetic polypeptide
  REGION 1..30: note = MISC_FEATURE - This sequence may encompass 1-6 "Gly Gly Gly Gly Ser" repeating units wherein some positions may be absent
  REGION 1..30: note = See specification as filed for detailed description of substitutions and preferred embodiments
GGGGSGGGGSGGGGSGGGGSGGGGSGGGGS

SEQ ID NO: 3205 - protein, 275 aa, Homo sapiens
HGEGTFTSDVSSYLEEQAAKEFIAWLVKGGGGGGGSGGGGSGGGGSAESKYGPPCPPCPAPEAAGGPSVFLFPPKPKDTLMISRTPEVTCVVVDVSQEDPEVQFNWYVDGVEVHNAKTKPREEQFNSTYRVVSVLTVLHQDWLNGKEYKCKVSNKGLPSSIEKTISKAKGQPREPQVYTLPPSQEEMTKNQVSLTCLVKGFYPSDIAVEWESNGQPENNYKTTPPVLDSDGSFFLYSRLTVDKSRWQEGNVFSCSVMHEALHNHYTQKSLSLSLG

SEQ ID NO: 3206 - protein, 40 aa, synthetic construct
  REGION 1..40: note = Description of Artificial Sequence: Synthetic polypeptide
  MOD_RES 2: note = D-Ala, Gly, Val, Leu, Ile, Ser or Thr
  MOD_RES 16: note = Gly, Glu, Asp or Lys
  MOD_RES 27: note = Val or Ile
  REGION 1..40: note = See specification as filed for detailed description of substitutions and preferred embodiments
HXEGTFTSDVSSYLEXQAAKEFIAWLXKGGPSSGAPPPCC

SEQ ID NO: 3207 - protein, 40 aa, synthetic construct
  REGION 1..40: note = Description of Artificial Sequence: Synthetic polypeptide
  REGION 1..40: note = See specification as filed for detailed description of substitutions and preferred embodiments
HVEGTFTSDVSSYLEEQAAKEFIAWLIKGGPSSGAPPPCC

SEQ ID NO: 3208 - protein, 39 aa, synthetic construct
  REGION 1..39: note = Description of Artificial Sequence: Synthetic polypeptide
HGEGTFTSDLSKQMEEEAVKLFIEWLKNGGPSSGAPPPS

SEQ ID NO: 3209 - protein, 39 aa, synthetic construct
  REGION 1..39: note = Description of Artificial Sequence: Synthetic polypeptide
HGEGTFTSDLSKQMEEEAVRLFIEWLKNGGPKSGAPPPS

SEQ ID NO: 3210 - protein, 38 aa, synthetic construct
  REGION 1..38: note = Description of Artificial Sequence: Synthetic polypeptide
GEGTFTSDLSKQMEEEAVKLFIEWLKNGGPSSGAPPPS

SEQ ID NO: 3211 - protein, 39 aa, synthetic construct
  REGION 1..39: note = Description of Artificial Sequence: Synthetic polypeptide
  MOD_RES 14: note = NorLeu
HGEGTFTSDLSRQXEEEAVRLFIEWLRNGGPKSGAPPPS

SEQ ID NO: 3212 - protein, 39 aa, synthetic construct; identical to SEQ ID NO: 3208
  REGION 1..39: note = Description of Artificial Sequence: Synthetic polypeptide

SEQ ID NO: 3213 - protein, 39 aa, synthetic construct; identical to SEQ ID NO: 3208
  REGION 1..39: note = Description of Artificial Sequence: Synthetic polypeptide

SEQ ID NO: 3214 - protein, 39 aa, synthetic construct; identical to SEQ ID NO: 3208
  REGION 1..39: note = Description of Artificial Sequence: Synthetic polypeptide

SEQ ID NO: 3215 - protein, 39 aa, synthetic construct; identical to SEQ ID NO: 3208
  REGION 1..39: note = Description of Artificial Sequence: Synthetic polypeptide

SEQ ID NO: 3216 - protein, 40 aa, synthetic construct; identical to SEQ ID NO: 3183
  REGION 1..40: note = Description of Artificial Sequence: Synthetic polypeptide

SEQ ID NO: 3217 - protein, 40 aa, synthetic construct; identical to SEQ ID NO: 3183
  REGION 1..40: note = Description of Artificial Sequence: Synthetic polypeptide

SEQ ID NO: 3218 - protein, 40 aa, synthetic construct; identical to SEQ ID NO: 3183
  REGION 1..40: note = Description of Artificial Sequence: Synthetic polypeptide

SEQ ID NO: 3219 - protein, 40 aa, synthetic construct; identical to SEQ ID NO: 3183
  REGION 1..40: note = Description of Artificial Sequence: Synthetic polypeptide

SEQ ID NO: 3220 - protein, 40 aa, synthetic construct; identical to SEQ ID NO: 3183
  REGION 1..40: note = Description of Artificial Sequence: Synthetic polypeptide

SEQ ID NO: 3221 - protein, 40 aa, synthetic construct; identical to SEQ ID NO: 3183
  REGION 1..40: note = Description of Artificial Sequence: Synthetic polypeptide

SEQ ID NO: 3222 - protein, 30 aa, synthetic construct
  REGION 1..30: note = Description of Artificial Sequence: Synthetic polypeptide
AEGTFTSDVSSYLEGQAAREFIAWLVKGRG

SEQ ID NO: 3223 - protein, 30 aa, synthetic construct; identical to SEQ ID NO: 3222
  REGION 1..30: note = Description of Artificial Sequence: Synthetic polypeptide

SEQ ID NO: 3224 - protein, 32 aa, synthetic construct
  REGION 1..32: note = Description of Artificial Sequence: Synthetic polypeptide
HAEGTFTSDVSSYLEGQAAREFIAWLVRGRGK

SEQ ID NO: 3225 - protein, 32 aa, synthetic construct; identical to SEQ ID NO: 3224
  REGION 1..32: note = Description of Artificial Sequence: Synthetic polypeptide

SEQ ID NO: 3226 - protein, 31 aa, synthetic construct
  REGION 1..31: note = Description of Artificial Sequence: Synthetic polypeptide
  MOD_RES 2: note = Aib
HXEGTFTSDVSSYLEGQAAKEFIAWLVKGRK

SEQ ID NO: 3227 - protein, 31 aa, synthetic construct
  REGION 1..31: note = Description of Artificial Sequence: Synthetic polypeptide
  MOD_RES 2: note = Aib
HXEGTFTSDVSSYLEGQAAKEFIAWLVKGKG

SEQ ID NO: 3228 - protein, 30 aa, synthetic construct
  REGION 1..30: note = Description of Artificial Sequence: Synthetic polypeptide
  MOD_RES 2: note = Aib
  MOD_RES 16: note = Aib
HXEGTFTSDVSSYLEXQAAKEFIAWLVKGK

SEQ ID NO: 3229 - protein, 30 aa, synthetic construct
  REGION 1..30: note = Description of Artificial Sequence: Synthetic polypeptide
  MOD_RES 2: note = Aib
  MOD_RES 16: note = Aib
  MOD_RES 26: note = beta leucine
HXEGTFTSDVSSYLEXQAAKEFIAWXVKGK

SEQ ID NO: 3230 - protein, 31 aa, synthetic construct
  REGION 1..31: note = Description of Artificial Sequence: Synthetic polypeptide
  MOD_RES 2: note = Aib
  MOD_RES 16: note = Aib
HXEGTFTSDVSSYLEXQAAKEFIAWLVKGRK

SEQ ID NO: 3231 - protein, 31 aa, synthetic construct
  REGION 1..31: note = Description of Artificial Sequence: Synthetic polypeptide
  MOD_RES 2: note = Aib
  MOD_RES 16: note = Aib
  MOD_RES 26: note = beta leucine
HXEGTFTSDVSSYLEXQAAKEFIAWXVKGRK

SEQ ID NO: 3232 - protein, 31 aa, synthetic construct; identical to SEQ ID NO: 3231
  REGION 1..31: note = Description of Artificial Sequence: Synthetic polypeptide
  MOD_RES 2: note = Aib
  MOD_RES 16: note = Aib
  MOD_RES 26: note = alpha methyl leucine

SEQ ID NO: 3233 - protein, 31 aa, synthetic construct
  REGION 1..31: note = Description of Artificial Sequence: Synthetic polypeptide
  MOD_RES 2: note = Aib
  MOD_RES 6: note = AMEF
  MOD_RES 16: note = Aib
HXEGTXTSDVSSYLEXQAAKEFIAWLVKGRK

SEQ ID NO: 3234 - protein, 31 aa, synthetic construct
  REGION 1..31: note = Description of Artificial Sequence: Synthetic polypeptide
  MOD_RES 2: note = Aib
  MOD_RES 10: note = beta leucine
  MOD_RES 16: note = Aib
HXEGTFTSDXSSYLEXQAAKEFIAWLVKGRK

SEQ ID NO: 3235 - protein, 31 aa, synthetic construct
  REGION 1..31: note = Description of Artificial Sequence: Synthetic polypeptide
  MOD_RES 2: note = Aib
  MOD_RES 16: note = Aib
HXEGTFTSDVSSYLEXQAAKEFIAWLVKGGK

SEQ ID NO: 3236 - protein, 31 aa, synthetic construct
  REGION 1..31: note = Description of Artificial Sequence: Synthetic polypeptide
  MOD_RES 2: note = Aib
  MOD_RES 16: note = Aib
HXEGTFTSDVSSYLEXQAAKEFIAWLKNGGK

SEQ ID NO: 3237 - protein, 31 aa, synthetic construct
  REGION 1..31: note = Description of Artificial Sequence: Synthetic polypeptide
  MOD_RES 2: note = Aib
  MOD_RES 16: note = Aib
  MOD_RES 31: note = Aeea
HXEGTFTSDVSSYLEXQAAKEFIAWLKNGGX

SEQ ID NO: 3238 - protein, 31 aa, synthetic construct
  REGION 1..31: note = Description of Artificial Sequence: Synthetic polypeptide
  MOD_RES 2: note = Aib
  MOD_RES 16: note = Aib
HXEGTFTSDVSSYLEXQAAKEFIAWLVKGGG

SEQ ID NO: 3239 - protein, 31 aa, synthetic construct
  REGION 1..31: note = Description of Artificial Sequence: Synthetic polypeptide
  MOD_RES 2: note = Aib
HXEGTFTSDVSSYLEGQAAKEFIAWLVKGGG

SEQ ID NO: 3240 - protein, 31 aa, synthetic construct
  REGION 1..31: note = Description of Artificial Sequence: Synthetic polypeptide
  MOD_RES 2: note = Aib
HXEGTFTSDVSSYLEGQAAKEFIAWLVKGGK

SEQ ID NO: 3241 - protein, 39 aa, synthetic construct
  REGION 1..39: note = Description of Artificial Sequence: Synthetic polypeptide
  MOD_RES 2: note = Aib
  MOD_RES 16: note = Aib
HXEGTFTSDVSSYLEXEAVRLFIEWLKNGGPSSGAPPPS

SEQ ID NO: 3242 - protein, 31 aa, synthetic construct; identical to SEQ ID NO: 3191
  REGION 1..31: note = Description of Artificial Sequence: Synthetic polypeptide

SEQ ID NO: 3243 - protein, 31 aa, synthetic construct
  REGION 1..31: note = Description of Artificial Sequence: Synthetic polypeptide
  MOD_RES 2: note = Aib
HXEGTFTSDVSSYLEEQAAKEFIAWLVKGGG

SEQ ID NO: 3244 - protein, 31 aa, synthetic construct
  REGION 1..31: note = Description of Artificial Sequence: Synthetic polypeptide
  MOD_RES 2: note = Aib
HXEGTFTSDYSSYLEEQAAKEFIAWLVKGGG

SEQ ID NO: 3245 - protein, 31 aa, synthetic construct
  REGION 1..31: note = Description of Artificial Sequence: Synthetic polypeptide
  MOD_RES 2: note = Aib
HXEGTFTSDVSKYLEEEAVRLFIEWLKNGGG

SEQ ID NO: 3246 - protein, 31 aa, synthetic construct
  REGION 1..31: note = Description of Artificial Sequence: Synthetic polypeptide
  MOD_RES 2: note = Aib
HXEGTFTSDVSKYLEEEAAKLFIEWLKNGGG

SEQ ID NO: 3247 - protein, 31 aa, synthetic construct
  REGION 1..31: note = Description of Artificial Sequence: Synthetic polypeptide
  MOD_RES 2: note = Aib
HXEGTFTSDVSKYLEEEAAKLFIEWLVKGGG

SEQ ID NO: 3248 - protein, 30 aa, synthetic construct
  REGION 1..30: note = Description of Artificial Sequence: Synthetic polypeptide
  MOD_RES 2: note = Aib
  MOD_RES 16: note = Aib
HXIGTFTSDVSSYLEXQAAKEFIAWLVKGG

SEQ ID NO: 3249 - protein, 30 aa, synthetic construct
  REGION 1..30: note = Description of Artificial Sequence: Synthetic polypeptide
  MOD_RES 2: note = Aib
  MOD_RES 16: note = Aib
HXEGTFTSEVSSYLEXQAAKEFIAWLVKGG

SEQ ID NO: 3250 - skipped

SEQ ID NO: 3251 - protein, 5 aa, synthetic construct
  REGION 1..5: note = Description of Artificial Sequence: Synthetic polypeptide
GGGGG

SEQ ID NO: 3252 - protein, 7 aa, synthetic construct
  REGION 1..7: note = Description of Artificial Sequence: Synthetic polypeptide
GGGGGGG

SEQ ID NO: 3253 - protein, 15 aa, synthetic construct
  REGION 1..15: note = Description of Artificial Sequence: Synthetic polypeptide
GGGGSGGGGSGGGGS

SEQ ID NO: 3254 - protein, 6 aa, synthetic construct
  REGION 1..6: note = Description of Artificial Sequence: Synthetic polypeptide
GGGGGK

SEQ ID NO: 3255 - protein, 6 aa, synthetic construct
  REGION 1..6: note = Description of Artificial Sequence: Synthetic polypeptide
GGGGGR

SEQ ID NO: 3256 - protein, 8 aa, synthetic construct
  REGION 1..8: note = Description of Artificial Sequence: Synthetic polypeptide
GGGKGGGG

SEQ ID NO: 3257 - protein, 8 aa, synthetic construct
  REGION 1..8: note = Description of Artificial Sequence: Synthetic polypeptide
GGGNGSGG

SEQ ID NO: 3258 - protein, 8 aa, synthetic construct
  REGION 1..8: note = Description of Artificial Sequence: Synthetic polypeptide
GGGCGGGG

SEQ ID NO: 3259 - protein, 5 aa, synthetic construct
  REGION 1..5: note = Description of Artificial Sequence: Synthetic polypeptide
GPNGG

SEQ ID NO: 3260 - protein, 8 aa, synthetic construct
  REGION 1..8: note = Description of Artificial Sequence: Synthetic polypeptide
GGGKGGGG

SEQ ID NO: 3261 - protein, 5 aa, synthetic construct
  REGION 1..5: note = Description of Artificial Sequence: Synthetic polypeptide
GGGGS

SEQ ID NO: 3262 - protein, 10 aa, synthetic construct
  REGION 1..10: note = Description of Artificial Sequence: Synthetic polypeptide
GGGGSGGGGS

SEQ ID NO: 3263 - protein, 20 aa, synthetic construct
  REGION 1..20: note = Description of Artificial Sequence: Synthetic polypeptide
GGGGSGGGGSGGGGSGGGGS

SEQ ID NO: 3264 - protein, 25 aa, synthetic construct
  REGION 1..25: note = Description of Artificial Sequence: Synthetic polypeptide
GGGGSGGGGSGGGGSGGGGSGGGGS

SEQ ID NO: 3265 - protein, 6 aa, synthetic construct
  REGION 1..6: note = Description of Artificial Sequence: Synthetic polypeptide
GGEGGG

SEQ ID NO: 3266 - protein, 8 aa, synthetic construct
  REGION 1..8: note = Description of Artificial Sequence: Synthetic polypeptide
GGEEEGGG

SEQ ID NO: 3267 - protein, 5 aa, synthetic construct
  REGION 1..5: note = Description of Artificial Sequence: Synthetic polypeptide
GEEEG

SEQ ID NO: 3268 - protein, 4 aa, synthetic construct
  REGION 1..4: note = Description of Artificial Sequence: Synthetic polypeptide
GEEE

SEQ ID NO: 3269 - protein, 6 aa, synthetic construct
  REGION 1..6: note = Description of Artificial Sequence: Synthetic polypeptide
GGDGGG

SEQ ID NO: 3270 - protein, 8 aa, synthetic construct
  REGION 1..8: note = Description of Artificial Sequence: Synthetic polypeptide
GGDDDGGG

SEQ ID NO: 3271 - protein, 5 aa, synthetic construct
  REGION 1..5: note = Description of Artificial Sequence: Synthetic polypeptide
GDDDG

SEQ ID NO: 3272 - protein, 4 aa, synthetic construct
  REGION 1..4: note = Description of Artificial Sequence: Synthetic polypeptide
GDDD

SEQ ID NO: 3273 - protein, 21 aa, synthetic construct
  REGION 1..21: note = Description of Artificial Sequence: Synthetic polypeptide
GGGGSDDSDEGSDGEDGGGGS

SEQ ID NO: 3274 - protein, 5 aa, synthetic construct
  REGION 1..5: note = Description of Artificial Sequence: Synthetic polypeptide
WEWEW

SEQ ID NO: 3275 - protein, 5 aa, synthetic construct
  REGION 1..5: note = Description of Artificial Sequence: Synthetic polypeptide
FEFEF

SEQ ID NO: 3276 - protein, 6 aa, synthetic construct
  REGION 1..6: note = Description of Artificial Sequence: Synthetic polypeptide
EEEWWW

SEQ ID NO: 3277 - protein, 6 aa, synthetic construct
  REGION 1..6: note = Description of Artificial Sequence: Synthetic polypeptide
EEEFFF

SEQ ID NO: 3278 - protein, 7 aa, synthetic construct
  REGION 1..7: note = Description of Artificial Sequence: Synthetic polypeptide
WWEEEWW

SEQ ID NO: 3279 - protein, 7 aa, synthetic construct
  REGION 1..7: note = Description of Artificial Sequence: Synthetic polypeptide
FFEEEFF

SEQ ID NO: 3280-3282 - skipped (3 entries)

SEQ ID NO: 3283 - protein, 22 aa, synthetic construct
  REGION 1..22: note = Description of Artificial Sequence: Synthetic polypeptide
GSGSATGGSGSTASSGSGSATH

SEQ ID NO: 3284 - protein, 22 aa, synthetic construct
  REGION 1..22: note = Description of Artificial Sequence: Synthetic polypeptide
HGSGSATGGSGSTASSGSGSAT

SEQ ID NO: 3285 - protein, 19 aa, synthetic construct
  REGION 1..19: note = Description of Artificial Sequence: Synthetic polypeptide
AEAAAKEAAAKEAAAKAGG

SEQ ID NO: 3286 - protein, 33 aa, synthetic construct
  REGION 1..33: note = Description of Artificial Sequence: Synthetic polypeptide
  MOD_RES 2: note = Aib
  MOD_RES 16: note = Aib
  MOD_RES 31: note = Aeea
  MOD_RES 32: note = Aeea
HXEGTFTSDVSSYLEXQAAKEFIAWLKNGGXXK

SEQ ID NO: 3287 - protein, 31 aa, synthetic construct; identical to SEQ ID NO: 3238
  REGION 1..31: note = Description of Artificial Sequence: Synthetic polypeptide
  MOD_RES 2: note = Aib
  MOD_RES 16: note = Aib

SEQ ID NO: 3288 - protein, 31 aa, synthetic construct
  REGION 1..31: note = Description of Artificial Sequence: Synthetic polypeptide
  MOD_RES 2: note = Aib
HXEGTFTSDVSSYLEGEAAKKFIAWLVKGGG

SEQ ID NO: 3289 - protein, 31 aa, synthetic construct
  REGION 1..31: note = Description of Artificial Sequence: Synthetic polypeptide
  MOD_RES 2: note = Aib
HXEGTFTSDVSSYLEEQAAKEFIAWLVKGGK

SEQ ID NO: 3290 - protein, 39 aa, synthetic construct; identical to SEQ ID NO: 3241
  REGION 1..39: note = Description of Artificial Sequence: Synthetic polypeptide
  MOD_RES 2: note = Aib
  MOD_RES 16: note = Aib

SEQ ID NO: 3291 - protein, 31 aa, synthetic construct; identical to SEQ ID NO: 3191
  REGION 1..31: note = Description of Artificial Sequence: Synthetic polypeptide

SEQ ID NO: 3292 - protein, 31 aa, synthetic construct; identical to SEQ ID NO: 3243
  REGION 1..31: note = Description of Artificial Sequence: Synthetic polypeptide
  MOD_RES 2: note = Aib

SEQ ID NO: 3293 - protein, 31 aa, synthetic construct; identical to SEQ ID NO: 3244
  REGION 1..31: note = Description of Artificial Sequence: Synthetic polypeptide
  MOD_RES 2: note = Aib

SEQ ID NO: 3294 - protein, 31 aa, synthetic construct; identical to SEQ ID NO: 3245
  REGION 1..31: note = Description of Artificial Sequence: Synthetic polypeptide
  MOD_RES 2: note = Aib

SEQ ID NO: 3295 - protein, 31 aa, synthetic construct; identical to SEQ ID NO: 3246
  REGION 1..31: note = Description of Artificial Sequence: Synthetic polypeptide
  MOD_RES 2: note = Aib

SEQ ID NO: 3296 - protein, 31 aa, synthetic construct; identical to SEQ ID NO: 3247
  REGION 1..31: note = Description of Artificial Sequence: Synthetic polypeptide
  MOD_RES 2: note = Aib

SEQ ID NO: 3297 - protein, 30 aa, synthetic construct; identical to SEQ ID NO: 3248
  REGION 1..30: note = Description of Artificial Sequence: Synthetic polypeptide
  MOD_RES 2: note = Aib
  MOD_RES 16: note = Aib

SEQ ID NO: 3298 - protein, 30 aa, synthetic construct; identical to SEQ ID NO: 3249
  REGION 1..30: note = Description of Artificial Sequence: Synthetic polypeptide
  MOD_RES 2: note = Aib
  MOD_RES 16: note = Aib

SEQ ID NO: 3299 - protein, 30 aa, synthetic construct
  REGION 1..30: note = Description of Artificial Sequence: Synthetic polypeptide
  MOD_RES 2: note = Aib
  MOD_RES 16: note = Aib
HXAGTFTSDVSSYLEXQAAKEFIAWLVKGG

SEQ ID NO: 3300 - protein, 30 aa, synthetic construct
  REGION 1..30: note = Description of Artificial Sequence: Synthetic polypeptide
  MOD_RES 2: note = Aib
  MOD_RES 16: note = Aib
HXEGTFTSDVSSYLEXQAAKEFAAWLVKGG

SEQ ID NO: 3301 - protein, 30 aa, synthetic construct
  REGION 1..30: note = Description of Artificial Sequence: Synthetic polypeptide
  MOD_RES 2: note = Aib
  MOD_RES 16: note = Aib
HXEGTFTSDVSSYLEXQAAKEFIAALVKGG

SEQ ID NO: 3302 - protein, 31 aa, synthetic construct
  REGION 1..31: note = Description of Artificial Sequence: Synthetic polypeptide
  MOD_RES 2: note = Aib
  MOD_RES 16: note = Aib
HXTGTFTSDVSSYLEXQAAKEFIAWLVKGGG

SEQ ID NO: 3303 - protein, 31 aa, synthetic construct
  REGION 1..31: note = Description of Artificial Sequence: Synthetic polypeptide
  MOD_RES 2: note = Aib
  MOD_RES 16: note = Aib
HXEGTFTSEVSSYLEXQAAKEFIAALVKGGG

SEQ ID NO: 3304 - protein, 31 aa, synthetic construct
  REGION 1..31: note = Description of Artificial Sequence: Synthetic polypeptide
  MOD_RES 2: note = Aib
  MOD_RES 16: note = Aib
HXEGTFTSDVSSYLEXQAAKEFIAALVKGGG

SEQ ID NO: 3305 - protein, 39 aa, synthetic construct
  REGION 1..39: note = Description of Artificial Sequence: Synthetic polypeptide
  MOD_RES 2: note = Aib
  MOD_RES 16: note = Aib
HXEGTFTSDVSSYLEEEAVRLFIEWLKNGGPSSGAPPPS

SEQ ID NO: 3306 - protein, 31 aa, synthetic construct
  REGION 1..31: note = Description of Artificial Sequence: Synthetic polypeptide
  MOD_RES 2: note = Aib
  MOD_RES 16: note = Aib
HXEGTFTSDYSSYLEXQAAKEFIAWLVKGGG

SEQ ID NO: 3307 - protein, 31 aa, synthetic construct; identical to SEQ ID NO: 3238
  REGION 1..31: note = Description of Artificial Sequence: Synthetic polypeptide
  MOD_RES 2: note = Aib
  MOD_RES 16: note = Aib

SEQ ID NO: 3308 - protein, 28 aa, synthetic construct
  REGION 1..28: note = Description of Artificial Sequence: Synthetic polypeptide
SQGTFTSDYSKYLDERRAKDFVQWLMNT

SEQ ID NO: 3309 - protein, 39 aa, synthetic construct; identical to SEQ ID NO: 3163
  REGION 1..39: note = Description of Artificial Sequence: Synthetic polypeptide
